(19) United States
(12) Patent Application Publication
(10) Pub. No.: US 2013/0005596 A1
(43) Pub. Date: Jan. 3, 2013

(54) NOVEL GENOMIC BIOMARKERS FOR IRRITABLE BOWEL SYNDROME DIAGNOSIS

(75) Inventors: Hua Gong, San Diego, CA (US); Sharat Singh, Rancho Santa Fe, CA (US); Nicholas Hoe, San Diego, CA (US)

(73) Assignee: Nestec S.A., Vevey (CH)

(21) Appl. No.: 13/479,127

(22) Filed: May 23, 2012

Related U.S. Application Data
(63) Continuation of application No. PCT/US10/58099, filed on Nov. 24, 2010.
(60) Provisional application No. 61/264,634, filed on Nov. 25, 2009.

(51) Int. Cl. C40B 30/04; G01N 27/62; C12Q 1/68

(52) U.S. Cl. 506/9; 435/6.11; 435/6.12

(57) ABSTRACT

The invention provides novel biomarkers, kits, and methods of diagnosing, prognosing, and subtyping IBS. In one aspect, the invention provides novel genomic biomarkers for diagnosing, classifying, providing a prognosis for, and assigning therapy for IBS in a subject in need thereof. In another aspect, the present invention provides novel algorithms for the diagnosis and prognosis of IBS.

### CROSS-REFERENCE TO RELATED APPLICATIONS

[0001] This application is a continuation of PCT/US2010/058099, filed Nov. 24, 2010, which application claims priority to U.S. Application No. 61/264,634, filed Nov. 25, 2009, the teachings of which are incorporated herein by reference in their entirety for all purposes.

### BACKGROUND OF THE INVENTION

[0002] Irritable bowel syndrome (IBS) is the most common of all gastrointestinal disorders, affecting 10-20% of the general population and accounting for more than 50% of all patients with digestive complaints. However, studies suggest that only about 10% to 50% of those afflicted with IBS actually seek medical attention. Patients with IBS present with disparate symptoms such as, for example, abdominal pain predominantly related to defecation, diarrhea, constipation or alternating diarrhea and constipation, abdominal distention, gas, and excessive mucus in the stool. More than 40% of IBS patients have symptoms so severe that they have to take time off from work, curtail their social life, avoid sexual intercourse, cancel appointments, stop traveling, take medication, and even stay confined to their house for fear of embarrassment. The estimated health care cost of IBS in the United States is $8 billion per year (Talley et al., Gastroenterol., 109:1736-1741 (1995)).

[0003] The precise pathophysiology of IBS is not well understood. Nevertheless, there is a heightened sensitivity to visceral pain perception, known as peripheral sensitization. This sensitization involves a reduction in the threshold and an increase in the gain of the transduction processes of primary afferent neurons, attributable to a variety of mediators including monoamines (e.g., catecholamines and indoleamines), substance P, and a variety of cytokines and prostanoids such as E-type prostaglandins (see, e.g., Mayer et al., Gastroenterol., 107:271-293 (1994)). Also implicated in the etiopathology of IBS is intestinal motor dysfunction, which leads to abnormal handling of intraluminal contents and/or gas (see, e.g., Kellow et al., Gastroenterol., 92:1885-1893 (1987); Levitt et al., Ann. Int. Med., 124:422-424 (1996)). Psychological factors may also contribute to IBS symptoms appearing in conjunction with, if not triggered by, disturbances including depression and anxiety (see, e.g., Drossman et al., Gastroenterol. Int., 8:47-90 (1995)).

[0004] The causes of IBS are not well understood. The walls of the intestines are lined with layers of muscle that contract and relax as they move food from the stomach through the intestinal tract to the rectum. Normally, these muscles contract and relax in a coordinated rhythm. In IBS patients, these contractions are typically stronger and last longer than normal. As a result, food is forced through the intestines more quickly in some cases causing gas, bloating, and diarrhea. In other cases, the opposite occurs: food passage slows and stools become hard and dry causing constipation.

[0005] The precise pathophysiology of IBS remains to be elucidated. While gut dysmotility and altered visceral perception are considered important contributors to symptom pathogenesis (Quigley, Scand. J. Gastroenterol., 38 (Suppl. 237): 1-8 (2003); Mayer et al., Gastroenterol., 122:2032-2048 (2002)), this condition is now generally viewed as a disorder of the brain-gut axis. Recently, roles for enteric infection and intestinal inflammation have also been proposed. Studies have documented the onset of IBS following bacteriologically confirmed gastroenteritis, while others have provided evidence of low-grade mucosal inflammation (Spiller et al., Gut, 47:804-811 (2000); Dunlop et al., Gastroenterol., 125:1651-1659 (2003); Cumberland et al., Epidemiol. Infect., 130:453-460 (2003)) and immune activation (Gwee et al., Gut, 52:523-526 (2003); Pimentel et al., Am. J. Gastroenterol., 95:3503-3506 (2000)) in IBS. The enteric flora has also been implicated, and a recent study demonstrated the efficacy of the probiotic organism Bifidobacterium in treating the disorder through modulation of immune activity (O'Mahony et al., Gastroenterol., 128:541-551 (2005)).

[0006] The hypothalamic-pituitary-adrenal axis (HPA) is the core endocrine stress system in humans (De Wied et al., Front. Neuroendocrinol., 14:251-302 (1993)) and provides an important link between the brain and the gut immune system. Activation of the axis takes place in response to both physical and psychological stressors (Dinan, Br. J. Psychiatry, 164 :365-371 (1994)), both of which have been implicated in the pathophysiology of IBS (Cumberland et al., Epidemiol. Infect., 130:453-460 (2003)). Patients with IBS have been reported as having an increased rate of sexual and physical abuse in childhood together with higher rates of stressful life events in adulthood (Gaynes et al., Baillieres Clin. Gastroenterol., 13:437-452 (1999)). Such psychosocial trauma or poor cognitive coping strategy profoundly affects symptom severity, daily functioning, and health outcome.

[0007] Although the etiology of IBS is not fully characterized, the medical community has developed a consensus definition and criteria, known as the Rome II criteria, to aid in the diagnosis of IBS based upon patient history. The Rome II criteria requires three months of continuous or recurrent abdominal pain or discomfort over a one-year period that is relieved by defecation and/or associated with a change in stool frequency or consistency as well as two or more of the following: altered stool frequency, altered stool form, altered stool passage, passage of mucus, or bloating and abdominal distention. The absence of any structural or biochemical disorders that could be causing the symptoms is also a necessary condition. As a result, the Rome II criteria can be used only when there is a substantial patient history and is reliable only when there is no abnormal intestinal anatomy or metabolic process that would otherwise explain the symptoms. Similarly, the Rome III criteria recently developed by the medical community can be used only when there is presentation of a specific set of symptoms, a detailed patient history, and a physical examination.

[0008] It is well documented that diagnosing a patient as having IBS can be challenging due to the similarity in symptoms between IBS and other diseases or disorders. In fact, because the symptoms of IBS are similar or identical to the symptoms of so many other intestinal illnesses, it can take years before a correct diagnosis is made. For example, patients who have inflammatory bowel disease (IBD), but who exhibit mild signs and symptoms such as bloating, diarrhea, constipation, and abdominal pain, may be difficult to distinguish from patients with IBS. As a result, the similarity in symptoms between IBS and IBD renders rapid and accurate diagnosis difficult. The difficulty in differentially diagnosing IBS and IBD hampers early and effective treatment of these diseases. Unfortunately, rapid and accurate diagnostic methods for definitively distinguishing IBS from other intestinal diseases or disorders presenting with similar symptoms are currently not available. The present invention satisfies this need and provides related advantages as well.

### BRIEF SUMMARY OF THE INVENTION

[0009] The present invention provides methods, systems, and code for accurately classifying whether a sample from an individual is associated with Irritable Bowel Syndrome (IBS) or a subtype thereof. As a non-limiting example, the present invention is useful for classifying a sample from an individual as an IBS sample using a statistical algorithm and/or empirical data. The present invention is also useful for ruling out one or more diseases or disorders that present with IBS-like symptoms and ruling in IBS using a combination of statistical algorithms and/or empirical data. Thus, the present invention provides an accurate diagnostic prediction of IBS, classification of an IBS subtype, and prognostic information useful for guiding treatment decisions.

[0010] In one aspect, the present invention provides a method for diagnosing Irritable Bowel Syndrome (IBS) in a subject in need thereof, the method comprising: (a) isolating and/or amplifying RNA from a biological sample taken from the subject; (b) contacting the isolated and/or amplified RNA with a detection reagent under conditions suitable to transform the detection reagent into a complex comprising the detection reagent and an IBS RNA biomarker; (c) detecting the level of the complex; and (d) determining if the level of the complex more closely resembles a first reference level associated with IBS or a second reference level associated with an absence of IBS, thereby diagnosing IBS or a subtype thereof in the subject, wherein the biomarker is an RNA from a gene selected from the group consisting of those found in Table 4 such as CCDC147. In another embodiment, the gene is selected from the group consisting of those found in Table 6. In a more preferred embodiment, the gene is selected from the group consisting of those found in Table 7.

[0011] In another aspect, the present invention provides a method for monitoring the progression or regression of Irritable Bowel Syndrome (IBS) in a subject, said method comprising: (a) determining a first biomarker profile from a first biological sample taken from the subject at a first point in time; (b) determining a second biomarker profile from a second biological sample taken from the subject at a second point in time; and (c) comparing said first and said second biomarker profiles to (i) determine which biomarker profile most resembles or least resembles a first reference profile associated with IBS, (ii) determine which biomarker profile least resembles or most resembles a second reference profile associated with the absence of IBS, or (iii) determining at least two of the foregoing resemblances, wherein the biomarker profiles comprise information about the expression of at least 2 biomarkers found in Table 4, thereby monitoring progression or regression of IBS in said subject. In another embodiment, biomarker profiles comprise information about the expression of at least 2 biomarkers found in Table 6. In a more preferred embodiment, the biomarker profiles comprise information about the expression of at least 2 biomarkers found in Table 7.

[0012] In yet another aspect, the present invention provides a method for assigning therapy for IBS to a subject in need thereof, the method comprising: (a) isolating and/or amplifying RNA from a biological sample taken from the subject; (b) contacting the isolated and/or amplified RNA with a detection reagent under conditions suitable to transform the detection reagent into a complex comprising the detection reagent and an IBS RNA biomarker; (c) detecting the level of the complex; (d) determining if the level of the complex more closely resembles a first reference level associated with IBS or a second reference level associated with an absence of IBS; and (e) assigning therapy for IBS if said level more closely resembles said first reference level associated with IBS, wherein the IBS RNA biomarker is selected from the group consisting of those found in Table 4. In another embodiment, the gene is selected from the group consisting of those found in Table 6. In a more preferred embodiment, the gene is selected from the group consisting of those found in Table 7.

[0013] In certain embodiments, the methods of the invention further comprise classifying a sample as an IBS-constipation (IBS-C), IBS-diarrhea (IBS-D), IBS-mixed (IBS-M), IBS-alternating (IBS-A), or post-infectious IBS (IBS-PI) sample. In other embodiments, the methods further comprise classifying a non-IBS sample as a normal, inflammatory bowel disease (IBD), or non-IBD sample.

[0014] In certain embodiments, the methods for diagnosing IBS, monitoring the progression or regression of IBS and/or assigning therapy for IBS comprise the detection of at least 2, 3, 4, 5, or more of the biomarkers found in Table 2, Table 4, Table 6, and Table 7. In other embodiments, the methods further comprises the detection of a biomarker selected from the group consisting of a cytokine, a growth factor, an anti-neutrophil antibody, an anti-Saccharomyces cerevisiae antibody, an antimicrobial antibody, an anti-tissue transglutaminase (tTG) antibody, a lipocalin, a matrix metalloproteinase (MMP), a complex of lipocalin and MMP, a tissue inhibitor of metalloproteinases (TIMPs), a globulin (e.g., an alpha-globulin), an actin-severing protein, an S100 protein, a fibrinopeptide, calcitonin gene-related peptide (CGRP), a tachykinin, ghrelin, neurotensin, corticotropin-releasing hormone (CRH), elastase, C-reactive protein (CRP), lactoferrin, an anti-lactoferrin antibody, calprotectin, hemoglobin, NOD2/CARD15, serotonin reuptake transporter (SERT), tryptophan hydroxylase-1, 5-hydroxytryptamine (5-HT), lactulose, and a combination thereof.

[0015] In certain other embodiments, the methods of the present invention further comprise determining a symptom profile, wherein said symptom profile is determined by identifying the presence or severity of at least one symptom in said individual; and classifying said sample as an IBS sample or non-IBS sample using an algorithm based upon said diagnostic marker profile and said symptom profile.

[0016] These and other objects, aspects and embodiments will become more apparent with the detailed description and figures that follow.

### BRIEF DESCRIPTION OF THE DRAWINGS

[0017] FIG. 1 illustrates a Box-and-Whisker plot of the gene expression data for the eight training samples after processing via the RMA algorithm. Samples HG1 and 2 correspond to IBS-C samples, HG3, 4, and 5 correspond to IBS-D, and HG6, 7, and 8 correspond to healthy control samples.

[0018] FIG. 2 illustrates gene plots of the top 5 differentially expressed genes based on ANOVA analysis.

[0019] FIG. 3 illustrates the clustering results of unsupervised hierarchical clustering analysis performed using all probe sets on the arrays.

[0020] FIG. 4 illustrates a heat map of the clustering results of unsupervised hierarchical clustering analysis performed using all unmasked probe sets on the arrays. Global expression analysis of transcipts from IBS patients and healthy volunteers. Total RNA obtained from 3 IBS-D, 2 IBS-C and 3 healthy volunteers were analyzed on Affymetrix array containing more than 35,000 human genes. An unsupervisored hierarchical cluster analysis of 3 normal and 5 IBS samples. Red indicates genes that are elevated relative to the average expression values across all experiments. Green indicates genes that are decreased relative to the average expression value.

[0021] FIG. 5 illustrates a multidimensional scaling plot to visualize the separation among samples based on the gene expression profiles of all unmasked probe sets.

[0022] FIG. 6 illustrates the principal component analysis results. The left plot (A) shows how many percent of total variation can be explained by the top principal components. The right plot (B) shows the separation of the samples by the top 2 principal components.

[0023] FIGS. 7A-C illustrate volcano plots of the comparison between each pair of groups, specifically, between (A) IBS-C and IBS-D groups, (B) IBS-C and control groups, and (C) IBS-D and control groups.

[0024] FIG. 8 illustrates the results of qRT-PCR validation of the differential gene expression of the FOXD3, PI4K2A, ACSS2, ASIP, and OR2L8 genes in samples from IBS-M, IBS-C, IBS-D, and control (HV) subjects.

[0025] FIGS. 9A-C illustrate the results of qRT-PCR validation of the differential gene expression of the selected candidate biomarkers in samples from IBS-M, IBS-C, IBS-D, and control (HV) subjects.

[0026] FIGS. 10A-C illustrate the results of real time quantitative PCR validation of the expression of 36 selected differently expressed genes (DEGs) in samples from IBS-M, IBS-C, IBS-D, and control (HV) subjects.

[0027] FIG. 11 illustrate the results of real time quantitative PCR for five targeted genes (SERT, TPH1, MAO-A, TLR4, and TLR7) in samples from IBS-M, IBS-C, IBS-D, and control (HV) subjects.

[0028] The figures from US Patent Publication No. 2008/0085524, filed Aug. 14, 2007, are herein incorporated by reference in their entirety for all purposes.

### DETAILED DESCRIPTION OF THE INVENTION

### I. Introduction

[0029] Irritable bowel disease (IBS) is a highly prevalent functional gastrointestinal disorder affecting 15-20% population in Western countries, with a higher prevalence in women. IBS is classified into three groups according to predominant bowel symptoms: constipation predominant IBD (IBS-C), diarrhea predominant IBS (IBS-D), and IBS with alternating symptoms of diarrhea and constipation (IBS-A).

[0030] Diagnosing a patient as having IBS can be challenging due to the similarity in symptoms between IBS and other diseases or disorders. For example, patients who have inflammatory bowel disease (IBD), but who exhibit mild signs and symptoms such as bloating, diarrhea, constipation, and abdominal pain can be difficult to distinguish from patients with IBS. As a result, the similarity in symptoms between IBS and IBD renders rapid and accurate diagnosis difficult and hampers early and effective treatment of the disease.

[0031] IBS is a diagnosis of exclusion in the current clinical practice. Patients are diagnosed by symptom-based Rome criteria, which are recurrent abdominal pain or discomfort at least 3 days per month for the past 3 months, associated with improvement with defecation and onsets associated with a change in frequency or form of stool. The symptoms are often seen in other GI disorders such as functional dyspepsia, fibromyalgia, chronic pelvic pain, and interstitial cystitis. Existence of co-morbidities further complicates the diagnosis.

[0032] While the etiology of this disease remains obscure, there are a body of evidence suggesting several pathophysiological pathways are dysregulated including serotonin biosynthesis and metabolism (Gershon M D., J Clin Gastroenterol 39(5 Suppl 3):S184-93 (2005); Coates M D et al., Gastroenterology 126(7):1657-64 (2004); Mawe GM et al., Aliment Pharmacol Ther 23(8):1067-76 (2006)), mast cell infiltration (Róka R et al., Clin Gastroenterol Hepatol 5(5):550-5 (2007); Barbara G et al., Gastroenterology 2007 January; 132(1):26-37; Guilarte M et al., Gut 56(2):203-9 (2007); Barbara G et al., Gastroenterology 126(3):693-702 (2004); O'Sullivan M et al., Neurogastroenterol Motil 12(5):449-57 (2000)), visceral hypersensitivity, stress response and bacteria infection (post infectious-IBS). Given the multiple potential pathophysiologic etiologies of this phenotypic ally heterogeneous disease, it is unlikely that any single diagnostic test or biomarker will reliably identify subjects with IBS. Moreover, the reluctance of clinicians to rely upon symptom-based criteria to diagnose IBS plus the poor diagnostic values of the currently available tests justify the development of a simple but sensitive and specific assay to assist clinicians to make a confident diagnosis of IBS. Towards this goal, Prometheus Laboratories developed the first blood based test for IBS which consists 10 serum biomarkers and an algorithm. The markers are associated with biochemical or physiological pathways that are involved in gut motility, brain-gut axis, neuronal regulation or immune function. The sensitivity, specificity and accuracy of the Prometheus IBS Diagnostic test are 50%, 88% and 70%, respectively.

[0033] The present invention provides, among other aspects, a second generation IBS diagnostic test, employing a candidate gene focus pathway driven approach as well as genome wide gene expression profiling. Gene expression profiling in tissue samples taken from patients with IBS has been reported using sigmoid colonic mucosal tissue (Schmulson M W and Chang L., Am J Med 107(5A): 20S-26S (1999)). However, it is unknown whether there exist “surrogate” transcriptional biomarkers in peripheral blood cells of patients with IBS. Although such gene expression biomarkers have been reported in the literature, however, the markers were derived from data mining of a published inflammatory bowel disease study (Tillisch K and Chang L., Curr Gastroenterol Rep 7(4):249-56 (2005)). Here, we have conducted the first microarray study to identify gene expression biomarkers in peripheral blood samples taken from IBS patients and healthy subjects and the results are presented in this publication.

[0034] In current clinical practice, diagnosis of IBS is based on symptoms presented by the patients plus the exclusion of other gastrointestinal disorders. This practice leads clinicians to order a wide variety of tests before making a confident diagnosis of IBS. Unfortunately, most of the tests that clinicians routinely order, including complete blood count, chemistry, liver enzymes, thyroid function studies, and stool sampling, have very low diagnostic values in subjects with typical IBS symptoms and no alarm features (weight loss, blood in the stool, unexplained iron deficiency anemia, nocturnal diarrhea, or a family history of IBD, celiac sprue, or colon cancer) (Cash BD et al., American Journal of Gastroenterology 97(11): 2812-2819 (2002)). Patients are diagnosed by the symptom-based Rome criteria, which are recurrent abdominal pain or discomfort at least 3 days per month for the past 3 months, associated with improvement with defecation and onsets associated with a change in frequency or form of stool. The symptoms are often seen in other GI disorders such as functional dyspepsia, fibromyalgia, chronic pelvic pain, and interstitial cystitis. As a result, patients with IBS visit physicians more often, consume more medications, and undergo more diagnostic tests than nonIBS patients (Schmulson M W and Chang L., Am J Med 107 (5A): 20S-26S (1999); Tillisch K and Chang L., Curr Gastroenterol Rep 7(4):249-56 (2005)). Existence of co-morbidities further complicates the diagnosis. IBS symptoms significantly compromise patient's quality of life and increase health care costs (Spiegel BM et al., Arch Intern Med 164(16):1773-80 (2004)).

[0035] A gene expression profile study of IBS patient samples has been reported using sigmoid colon mucosa. Although “surrogate” biomarkers in peripheral blood cells in patients with IBS have been reported previously, the markers were selected by data mining from an existing inflammatory bowel disease study. As such, a need exists for the discovery of novel surrogate biomarkers that will better facilitate the diagnosis of IBS.

[0036] The present invention, in one aspect, fulfills this need through the discovery of novel gene expression markers useful for the diagnosis and prognosis of IBS. An Affymetrix microarray study using peripheral whole blood samples from 3 IBS-D, 2 IBS-C patients and 3 healthy volunteers. All IBS patients met Rome III criteria and healthy volunteers had no history of IBS or other active co-morbidities. Unsupervised analysis of the microarray data identified a set of 72 genes that distinguished IBS patients and healthy volunteers. The microarray expression profile of selected genes was further verified by real-time quantitative polymerase chain reaction. Validation of the selected genes was conducted in 22 IBS-C, 17 IBS-D, 12 IBD-M, and 21 healthy volunteers. The expression data was analyzed using Multiple Logistic Regression and Random Forest prediction. In this fashion, a subset of novel predictor genes distinguishing IBS patients from healthy subjects with high accuracy was confirmed. Expression of those genes was further compared in whole blood cells and its matching gut biopsy tissues.

[0037] The present invention has important implications for IBS diagnosis. For example, in one aspect of the invention, these novel IBS expression markers can be used for diagnosing, providing a prognosis for, and/or subtyping IBS in a subject in need thereof. In another aspect, these markers can complement the existing symptom-based diagnosis of IBS. In yet another aspect, these markers can be used in combination with other serological markers known in the art for the diagnosis and prognosis of IBS.

### II. Definitions

[0038] As used herein, the following terms have the meanings ascribed to them unless specified otherwise.

[0039] The term “classifying” includes “to associate” or “to categorize” a sample with a disease state. In certain instances, “classifying” is based on statistical evidence, empirical evidence, or both. In certain embodiments, the methods and systems of classifying use a so-called training set of samples having known disease states. Once established, the training data set serves as a basis, model, or template against which the features of an unknown sample are compared, in order to classify the unknown disease state of the sample. In certain instances, classifying the sample is akin to diagnosing the disease state of the sample. In certain other instances, classifying the sample is akin to differentiating the disease state of the sample from another disease state.

[0040] The term “Irritable Bowel Syndrome” or “IBS” includes a group of functional bowel disorders characterized by one or more symptoms including, but not limited to, abdominal pain, abdominal discomfort, change in bowel pattern, loose or more frequent bowel movements, diarrhea, and constipation, typically in the absence of any apparent structural abnormality. There are at least three forms of IBS, depending on which symptom predominates: (1) diarrhea-predominant (IBS-D); (2) constipation-predominant (IBS-C); and (3) IBS with alternating stool pattern (IBS-A). IBS can also occur in the form of a mixture of symptoms (IBS-M). There are also various clinical subtypes of IBS, such as post-infectious IBS (IBS-PI).

[0041] The term “sample” includes any biological specimen obtained from an individual. Suitable samples for use in the present invention include, without limitation, whole blood, plasma, serum, saliva, urine, stool, sputum, tears, any other bodily fluid, tissue samples (e.g., biopsy), and cellular extracts thereof (e.g., red blood cellular extract). In a preferred embodiment, the sample is a serum sample. The use of samples such as serum, saliva, and urine is well known in the art (see, e.g., Hashida et al., J. Clin. Lab. Anal., 11:267-86 (1997)). One skilled in the art will appreciate that samples such as serum samples can be diluted prior to the analysis of marker levels.

[0042] The term “biomarker” or “marker” includes any diagnostic marker such as a biochemical marker, serological marker, genetic marker, or other clinical or echographic characteristic that can be used to classify a sample from an individual as an IBS sample or to rule out one or more diseases or disorders associated with IBS-like symptoms in a sample from an individual. The term “biomarker” or “marker” also encompasses any classification marker such as a biochemical marker, serological marker, genetic marker, or other clinical or echographic characteristic that can be used to classify IBS into one of its various forms or clinical subtypes. Non-limiting examples of diagnostic markers suitable for use in the present invention are described below and include mRNAs and proteins found in Tables 2 and 3 below (e.g., FOXD3, PI4K2A, MAP1LC3A, ACSS2, ASIP, OR2L8, LPAR5, JARID1B, CDKN1C, etc.). Other examples of diagnostic markers include those described in US Patent Publication No. 2008/0085524, filed Aug. 14, 2007, U.S. Provisional Application Ser. No. 61/220,525, filed Jun. 25, 2009, and U.S. Provisional Application Ser. No. 61/256,717, filed Oct. 30, 2009, all of which are herein incorporated by reference in their entirety for all purposes. In some embodiments, diagnostic markers can be used to classify IBS into one of its various forms or clinical subtypes. In other embodiments, classification markers can be used to classify a sample as an IBS sample or to rule out one or more diseases or disorders associated with IBS-like symptoms. One skilled in the art will know of additional diagnostic and classification markers suitable for use in the present invention.

[0043] As used herein, the term “profile” includes any set of data that represents the distinctive features or characteristics associated with a disease or disorder such as IBS or IBD. The term encompasses a “diagnostic marker profile” that analyzes one or more diagnostic markers in a sample, a “symptom profile” that identifies one or more IBS-related clinical factors (i.e., symptoms) an individual is experiencing or has experienced, and combinations thereof. For example, a “diagnostic marker profile” can include a set of data that represents the presence or level of one or more diagnostic markers associated with IBS and/or IBD. In one embodiment, a profile includes an “expression profile” or “nucleic acid profile” comprising a set of data corresponding to the level of expression of a marker or set of markers (e.g., RNAs, mRNAs, miRNAs, non-coding RNAs, proteins, and the like) in a sample taken from a subject. A “gene expression profile” includes a set of gene expression data that represents the RNA, mRNA, miRNA, and/or non-coding RNA levels of one or more genes associated with IBS, IBD, or a subtype thereof. Likewise, a “symptom profile” can include a set of data that represents the presence, severity, frequency, and/or duration of one or more symptoms associated with IBS and/or IBD.

[0044] The term “individual,” “subject,” or “patient” typically refers to humans, but also to other animals including, e.g., other primates, rodents, canines, felines, equines, ovines, porcines, and the like.

[0045] The term “gene” includes segments of DNA that are transcribed into RNA, including mRNA, miRNA, tRNA, rRNA, non-coding RNA, and the like. The term embraces segments of DNA involved in producing a polypeptide chain as well as regions preceding and following the coding region, such as the promoter, 5′-untranslated region (5′UTR), and 3′-untranslated region (3′UTR), as well as intervening sequences (introns) located between individual coding segments (exons).

[0046] The term “nucleic acid” or “polynucleotide” includes deoxyribonucleotides or ribonucleotides and polymers thereof in either single- or double-stranded form. Unless specifically limited, the term encompasses nucleic acids containing known analogues of natural nucleotides that have similar binding properties as the reference nucleic acid and are metabolized in a manner similar to naturally occurring nucleotides. Unless otherwise indicated, a particular nucleic acid sequence also implicitly encompasses conservatively modified variants thereof (e.g., degenerate codon substitutions), alleles, splice variants, orthologs, SNPs, and complementary sequences as well as the sequence explicitly indicated. Specifically, degenerate codon substitutions may be achieved by generating sequences in which the third position of one or more selected (or all) codons is substituted with mixed-base and/or deoxyinosine residues (Batzer et al., Nucleic Acid Res., 19:5081 (1991); Ohtsuka et al., J. Biol. Chem., 260:2605-2608 (1985); Rossolini et al., Mol. Cell. Probes, 8:91-98 (1994)). The term nucleic acid is used interchangeably with gene, cDNA, and RNA encoded by a gene (e.g., mRNA, miRNA, tRNA, rRNA, etc.).

[0047] The term “polymorphism” include the occurrence of two or more genetically determined alternative sequences or alleles in a population. A “polymorphic site” includes the locus at which divergence occurs. A polymorphic locus can be as small as one base pair (single nucleotide polymorphism, or SNP) or can comprise an insertion or deletion of multiple nucleotides. Polymorphic markers include, but are not limited to, restriction fragment length polymorphisms, variable number of tandem repeats (VNTR's), hypervariable regions, minisatellites, dinucleotide repeats, trinucleotide repeats, tetranucleotide repeats, simple sequence repeats, and insertion elements such as Alu. The first identified allele is arbitrarily designated as the reference allele and other alleles are designated as alternative or “variant alleles.” The allele occurring most frequently in a selected population is sometimes referred to as the “wild-type” allele. Diploid organisms may be homozygous or heterozygous for the variant alleles. The variant allele may or may not produce an observable physical or biochemical characteristic (“phenotype”) in an individual carrying the variant allele. For example, a variant allele may alter the enzymatic activity of a protein encoded by a gene of interest.

[0048] A “single nucleotide polymorphism” or “SNP” occurs at a polymorphic site occupied by a single nucleotide, which is the site of variation between allelic sequences. The site is usually preceded by and followed by highly conserved sequences of the allele (e.g., sequences that vary in less than 1/100 or 1/1000 members of the populations). A SNP usually arises due to substitution of one nucleotide for another at the polymorphic site. A transition is the replacement of one purine by another purine or one pyrimidine by another pyrimidine. A transversion is the replacement of a purine by a pyrimidine or vice versa. Single nucleotide polymorphisms can also arise from a deletion of a nucleotide or an insertion of a nucleotide relative to a reference allele.

[0049] The term “genotype” as used herein includes to the genetic composition of an organism, including, for example, whether a diploid organism is heterozygous or homozygous for one or more variant alleles of interest.

[0050] As used herein, the term “substantially the same amino acid sequence” includes an amino acid sequence that is similar, but not identical to, the naturally-occurring amino acid sequence. For example, an amino acid sequence that has substantially the same amino acid sequence as a naturally-occurring peptide, polypeptide, or protein can have one or more modifications such as amino acid additions, deletions, or substitutions relative to the amino acid sequence of the naturally-occurring peptide, polypeptide, or protein, provided that the modified sequence retains substantially at least one biological activity of the naturally-occurring peptide, polypeptide, or protein such as immunoreactivity. Comparison for substantial similarity between amino acid sequences is usually performed with sequences between about 6 and 100 residues, preferably between about 10 and 100 residues, and more preferably between about 25 and 35 residues. A particularly useful modification of a peptide, polypeptide, or protein of the present invention, or a fragment thereof, is a modification that confers, for example, increased stability. Incorporation of one or more D-amino acids is a modification useful in increasing stability of a polypeptide or polypeptide fragment. Similarly, deletion or substitution of lysine residues can increase stability by protecting the polypeptide or polypeptide fragment against degradation.

[0051] The term “monitoring the progression or regression of IBS” includes the use of the methods, systems, and code of the present invention to determine the disease state (e.g., presence or severity of IBS) of an individual. In certain instances, the results of an algorithm (e.g., a learning statistical classifier system) are compared to those results obtained for the same individual at an earlier time. In some embodiments, the methods, systems, and code of the present invention can be used to predict the progression of IBS, e.g., by determining a likelihood for IBS to progress either rapidly or slowly in an individual based on an analysis of diagnostic markers and/or the identification or IBS-related symptoms. In other embodiments, the methods, systems, and code of the present invention can be used to predict the regression of IBS, e.g., by determining a likelihood for IBS to regress either rapidly or slowly in an individual based on an analysis of diagnostic markers and/or the identification or IBS-related symptoms.

[0052] The term “monitoring drug efficacy in an individual receiving a drug useful for treating IBS” includes the use of the methods, systems, and code of the present invention to determine the effectiveness of a therapeutic agent for treating IBS after it has been administered. In certain instances, the results of an algorithm (e.g., a learning statistical classifier system) are compared to those results obtained for the same individual before initiation of use of the therapeutic agent or at an earlier time in therapy. As used herein, a drug useful for treating IBS is any compound or drug used to improve the health of the individual and includes, without limitation, IBS drugs such as serotonergic agents, antidepressants, chloride channel activators, chloride channel blockers, guanylate cyclase agonists, antibiotics, opioids, neurokinin antagonists, antispasmodic or anticholinergic agents, belladonna alkaloids, barbiturates, glucagon-like peptide-1 (GLP-1) analogs, corticotropin releasing factor (CRF) antagonists, probiotics, free bases thereof, pharmaceutically acceptable salts thereof, derivatives thereof, analogs thereof, and combinations thereof.

[0053] The term “therapeutically effective amount or dose” includes a dose of a drug that is capable of achieving a therapeutic effect in a subject in need thereof. For example, a therapeutically effective amount of a drug useful for treating IBS can be the amount that is capable of preventing or relieving one or more symptoms associated with IBS. The exact amount can be ascertainable by one skilled in the art using known techniques (see, e.g., Lieberman, Pharmaceutical Dosage Forms, Vols. 1-3 (1992); Lloyd, The Art, Science and Technology of Pharmaceutical Compounding (1999); Pickar, Dosage Calculations (1999); and Remington: The Science and Practice of Pharmacy, 20th Edition, Gennaro, Ed., Lippincott, Williams & Wilkins (2003)).

### III. Description of the Embodiments

[0054] The present invention provides methods, systems, and code for accurately classifying whether a sample from an individual is associated with IBS. In some embodiments, the present invention is useful for classifying a sample from an individual as an IBS sample using a statistical algorithm (e.g., a learning statistical classifier system) and/or empirical data (e.g., the presence or level of an IBS marker). The present invention is also useful for ruling out one or more diseases or disorders that present with IBS-like symptoms and ruling in IBS using a combination of statistical algorithms and/or empirical data. Accordingly, the present invention provides an accurate diagnostic prediction of IBS and prognostic information useful for guiding treatment decisions.

[0055] A. Diagnosing IBS

[0056] In one aspect, the present invention provides a method for diagnosing Irritable Bowel Syndrome (IBS) in a subject in need thereof, the method comprising: (a) isolating and/or amplifying RNA from a biological sample taken from the subject; (b) contacting the isolated and/or amplified RNA with a detection reagent under conditions suitable to transform the detection reagent into a complex comprising the detection reagent and an IBS RNA biomarker; (c) detecting the level of the complex; and (d) determining if the level of the complex more closely resembles a first reference level associated with IBS or a second reference level associated with an absence of IBS, thereby diagnosing IBS in the subject, wherein the biomarker is an RNA from a gene selected from the group consisting of those found in Table 4. In another embodiment, the gene is selected from the group consisting of those found in Table 6. In a more preferred embodiment, the gene is selected from the group consisting of those found in Table 7 such as at least 1, at least 2 or at least 3, 4, 5, 6, 7, 8, 9, 10, 11, 12, 13, 14, 15, 16, 17, 18, 19, 20, or 26.

[0057] In some embodiments of the invention, the IBS RNA biomarker is an mRNA or expressed non-coding RNA. In certain embodiments, the method comprises the detection of at least 2 or at least 3, 4, 5, 6, 7, 8, 9, 10, 11, 12, 13, 14, 15, 16, 17, 18, 19, 20, 25, 30, 35, 40, 45, 50, 55, 60, 65, 70, or more of the genes found in Table 4. In another preferred embodiment, the RNA biomarker(s) are found in Table 6 such as at least 1, at least 2 or at least 3, 4, 5, 6, 7, 8, 9, 10, 11, 12, 13, 14, 15, 16, 17, 18, 19, 20, 25, 30, 35, or 40. In a more preferred embodiment, the RNA biomarker(s) are found in Table 7 such as at least 1, at least 2 or at least 3, 4, 5, 6, 7, 8, 9, 10, 11, 12, 13, 14, 15, 16, 17, 18, 19, 20, or 26.

[0058] In one embodiment of the invention, the IBS RNA biomarker is a mRNA molecule encoding a protein having an amino acid sequence of any one of SEQ ID NOS:1 to 75 and 154 to 162. In another embodiment, the IBS RNA biomarker is an RNA molecule comprising a nucleic acid sequence of any one of SEQ ID NOS:76 to 153.

[0059] In a particular embodiment, the IBS RNA biomarker is an RNA molecule transcribed from a gene selected from the group consisting of CCDC147, VIPR1, LPAR5, CCDC144A, GNG3, ACSS2, ZNF33B, PMS2L2, RUSC1, ARHGE, ASIP, OR2L8, PI4K2A, and FOXD3. In a preferred embodiment, the gene is CCDC147, VIPR1, LPAR5, CCDC144A, or GNG3. In another embodiment, the method for diagnosing or subtyping IBS comprises detecting a panel of at least about 5 biomarkers. In a preferred embodiment, the markers comprise CCDC147, VIPR1, LPAR5, CCDC144A, and GNG3.

[0060] In certain embodiments, the detection reagent comprises an oligonucleotide and the step of detecting the level of the complex (e.g., via transformation) comprises oligonucleotide hybridization (e.g., microarray or bead-based hybridization assays, xMAP assay, northern blot, dot blot, RNase protection assay, and the like) and/or nucleic acid amplification (e.g., PCR, qPCR, RT-PCR, qRT-PCR, mass spectrometry, and the like). In yet other embodiments, the detection reagent is an antibody and the method of determining the level of complex (e.g., transformation) in the sample comprises an immunochemical assay (i.e., immunofluorescence assay, ELISA, IFA, and the like).

[0061] The sample used for detecting or determining the presence or level of at least one diagnostic marker is typically whole blood, plasma, serum, saliva, urine, stool (i.e., feces), tears, and any other bodily fluid, or a tissue sample (i.e., biopsy) such as a small intestine or colon sample. Preferably, the sample is serum, whole blood, plasma, stool, urine, or a tissue biopsy. In certain instances, the methods of the present invention further comprise obtaining the sample from the individual prior to detecting or determining the presence or level of at least one diagnostic marker in the sample.

[0062] In certain embodiments, the methods of the present invention comprise determining an RNA IBS biomarker profile in combination with an additional protein or serological IBS biomarker. In some embodiments, the additional diagnostic marker profile is determined by detecting the presence or level of at least one, two, three, four, five, six, seven, eight, nine, ten, or more additional diagnostic markers selected from those found in Table 2, those found in US Patent Publication No. 2008/0085524, filed Aug. 14, 2007, U.S. Provisional Application Ser. No. 61/220,525, filed Jun. 25, 2009, and U.S. Provisional Application Ser. No. 61/256,717, filed Oct. 30, 2009.

[0063] In some embodiments, a panel for measuring one or more of the diagnostic markers described above may be constructed and used for classifying the sample as an IBS sample, an IBS-subtype sample, or a non-IBS sample. One skilled in the art will appreciate that the presence or level of a plurality of diagnostic markers can be determined simultaneously or sequentially, using, for example, an aliquot or dilution of the individual's sample. In certain instances, the level of a particular diagnostic marker in the individual's sample is considered to be elevated when it is at least about 25%, 50%, 75%, 100%, 125%, 150%, 175%, 200%, 250%, 300%, 350%, 400%, 450%, 500%, 600%, 700%, 800%, 900%, or 1000% greater than the level of the same marker in a comparative sample (e.g., a normal, GI control, IBS, IBD, and/or Celiac disease sample) or population of samples (e.g., greater than a median level of the same marker in a comparative population of normal, GI control, IBS, IBD, and/or Celiac disease samples). In certain other instances, the level of a particular diagnostic marker in the individual's sample is considered to be lowered when it is at least about 5%, 10%, 15%, 20%, 25%, 30%, 35%, 40%, 45%, 50%, 55%, 60%, 65%, 70%, 75%, 80%, 85%, 90%, or 95% less than the level of the same marker in a comparative sample (e.g., a normal, GI control, IBS, IBD, and/or Celiac disease sample) or population of samples (e.g., less than a median level of the same marker in a comparative population of normal, GI control, IBS, IBD, and/or Celiac disease samples). In yet other embodiments, an IBS marker is considered to be differentially expressed when the magnitude its log2 fold change (i.e., positive or negative value) is at least about 0.5, 0.6, 0.7, 0.8, 0.9, 1.0, 1.1, 1.2, 1.3, 1.4, 1.5, 1.6, 1.7, 1.8, 1.9, 2.0, 2.1, 2.2, 2.3, 2.4, 2.5, 2.6, 2.7, 2.8, 2.9, 3.0 or greater, with respect to the same marker in a comparative population of normal, GI control, IBS, IBD, and/or Celiac disease samples. In a preferred embodiment, the magnitude of a differentially expressed IBS biomarker is at least about 1.0, more preferably at least about 1.5, and most preferably at least about 2.5.

[0064] In some embodiments, the method of ruling in IBS, diagnosing IBS, or classifying IBS comprises determining a diagnostic marker profile optionally in combination with a symptom profile, wherein the symptom profile is determined by identifying the presence or severity of at least one symptom in the individual; and classifying the sample as an IBS sample or non-IBS sample using an algorithm based upon the diagnostic marker profile and the symptom profile. One skilled in the art will appreciate that the diagnostic marker profile and the symptom profile can be determined simultaneously or sequentially in any order.

[0065] In some embodiments, classifying a sample as an IBS sample or non-IBS sample is based upon the diagnostic marker profile, alone or in combination with a symptom profile, in conjunction with a statistical algorithm. In certain instances, the statistical algorithm is a learning statistical classifier system. The learning statistical classifier system can be selected from the group consisting of a random forest (RF), classification and regression tree (C&RT), boosted tree, neural network (NN), support vector machine (SVM), general chi-squared automatic interaction detector model, interactive tree, multiadaptive regression spline, machine learning classifier, and combinations thereof. Preferably, the learning statistical classifier system is a tree-based statistical algorithm (e.g., RF, C&RT, etc.) and/or a NN (e.g., artificial NN, etc.).

[0066] In certain instances, the statistical algorithm is a single learning statistical classifier system. Preferably, the single learning statistical classifier system comprises a tree-based statistical algorithm such as a RF or C&RT. As a non-limiting example, a single learning statistical classifier system can be used to classify the sample as an IBS sample or non-IBS sample based upon a prediction or probability value and the presence or level of at least one diagnostic marker (i.e., diagnostic marker profile), alone or in combination with the presence or severity of at least one symptom (i.e., symptom profile). The use of a single learning statistical classifier system typically classifies the sample as an IBS sample with a sensitivity, specificity, positive predictive value, negative predictive value, and/or overall accuracy of at least about 75%, 76%, 77%, 78%, 79%, 80%, 81%, 82%, 83%, 84%, 85%, 86%, 87%, 88%, 89%, 90%, 91%, 92%, 93%, 94%, 95%, 96%, 97%, 98%, or 99%.

[0067] In certain other instances, the statistical algorithm is a combination of at least two learning statistical classifier systems. Preferably, the combination of learning statistical classifier systems comprises a RF and a NN, e.g., used in tandem or parallel. As a non-limiting example, a RF can first be used to generate a prediction or probability value based upon the diagnostic marker profile, alone or in combination with a symptom profile, and a NN can then be used to classify the sample as an IBS sample or non-IBS sample based upon the prediction or probability value and the same or different diagnostic marker profile or combination of profiles. Advantageously, the hybrid RF/NN learning statistical classifier system of the present invention classifies the sample as an IBS sample with a sensitivity, specificity, positive predictive value, negative predictive value, and/or overall accuracy of at least about 75%, 76%, 77%, 78%, 79%, 80%, 81%, 82%, 83%, 84%, 85%, 86%, 87%, 88%, 89%, 90%, 91%, 92%, 93%, 94%, 95%, 96%, 97%, 98%, or 99%.

[0068] In some instances, the data obtained from using the learning statistical classifier system or systems can be processed using a processing algorithm. Such a processing algorithm can be selected, for example, from the group consisting of a multilayer perceptron, backpropagation network, and Levenberg-Marquardt algorithm. In other instances, a combination of such processing algorithms can be used, such as in a parallel or serial fashion.

[0069] In certain embodiments, the methods of the present invention further comprise classifying the non-IBS sample as a normal, inflammatory bowel disease (IBD), or non-IBD sample. Classification of the non-IBS sample can be performed, for example, using at least one of the diagnostic markers described above.

[0070] In certain other embodiments, the methods of the present invention further comprise sending the IBS classification results to a clinician, e.g., a gastroenterologist or a general practitioner. In another embodiment, the methods of the present invention provide a diagnosis in the form of a probability that the individual has IBS. For example, the individual can have about a 0%, 5%, 10%, 15%, 20%, 25%, 30%, 35%, 40%, 45%, 50%, 55%, 60%, 65%, 70%, 75%, 80%, 85%, 90%, 95%, or greater probability of having IBS. In yet another embodiment, the methods of the present invention further provide a prognosis of IBS in the individual. For example, the prognosis can be surgery, development of a category or clinic al subtype of IBS, development of one or more symptoms, or recovery from the disease.

[0071] In some embodiments, the diagnosis of an individual as having IBS is followed by administering to the individual a therapeutically effective amount of a drug useful for treating one or more symptoms associated with IBS. Suitable IBS drugs include, but are not limited to, serotonergic agents, antidepressants, chloride channel activators, chloride channel blockers, guanylate cyclase agonists, antibiotics, opioid agonists, neurokinin antagonists, antispasmodic or anticholinergic agents, belladonna alkaloids, barbiturates, GLP-1 analogs, CRF antagonists, probiotics, free bases thereof, pharmaceutically acceptable salts thereof, derivatives thereof, analogs thereof, and combinations thereof. Other IBS drugs include bulking agents, dopamine antagonists, carminatives, tranquilizers, dextofisopam, phenytoin, timolol, and diltiazem. Additionally, amino acids like glutamine and glutamic acid which regulate intestinal permeability by affecting neuronal or glial cell signaling can be administered to treat patients with IBS.

[0072] In other embodiments, the methods of the present invention further comprise classifying the IBS sample as an IBS-constipation (IBS-C), IBS-diarrhea (IBS-D), IBS-mixed (IBS-M), IBS-alternating (IBS-A), or post-infectious IBS (IBS-PI) sample. In certain instances, the classification of the IBS sample into a category, form, or clinical subtype of IBS is based upon the presence or level of at least one, two, three, four, five, six, seven, eight, nine, ten, or more classification markers. Non-limiting examples of classification markers are described below. Preferably, at least one form of IBS is distinguished from at least one other form of IBS based upon the presence or level of leptin. In certain instances, the methods of the present invention can be used to differentiate an IBS-C sample from an IBS-A and/or IBS-D sample in an individual previously identified as having IBS. In certain other instances, the methods of the present invention can be used to classify a sample from an individual not previously diagnosed with IBS as an IBS-A sample, IBS-C sample, IBS-D sample, or non-IBS sample.

[0073] In certain embodiments, the methods further comprise sending the results from the classification to a clinician. In certain other embodiments, the methods further provide a diagnosis in the form of a probability that the individual has IBS-A, IBS-C, IBS-D, IBS-M, or IBS-PI. The methods of the present invention can further comprise administering to the individual a therapeutically effective amount of a drug useful for treating IBS-A, IBS-C, IBS-D, IBS-M, or IBS-PI. Suitable drugs include, but are not limited to, tegaserod (Zelnorm), alosetron (Lotronex®), lubiprostone (Amitiza), rifamixin (Xifaxan), MD-1100, probiotics, and a combination thereof. In instances where the sample is classified as an IBS-A or IBS-C sample and/or the individual is diagnosed with IBS-A or IBS-C, a therapeutically effective dose of tegaserod or other 5-HT₄ agonist (e.g., mosapride, renzapride, AG1-001, etc.) can be administered to the individual. In some instances, when the sample is classified as IBS-C and/or the individual is diagnosed with IBS-C, a therapeutically effective amount of lubiprostone or other chloride channel activator, rifamixin or other antibiotic capable of controlling intestinal bacterial overgrowth, MD-1100 or other guanylate cyclase agonist, asimadoline or other opioid agonist, or talnetant or other neurokinin antagonist can be administered to the individual. In other instances, when the sample is classified as IBS-D and/or the individual is diagnosed with IBS-D, a therapeutically effective amount of alosetron or other 5-HT₃ antagonist (e.g., ramosetron, DDP-225, etc.), crofelemer or other chloride channel blocker, talnetant or other neurokinin antagonist (e.g., saredutant, etc.), or an antidepressant such as a tricyclic antidepressant can be administered to the individual.

[0074] In additional embodiments, the methods of the present invention further comprise ruling out intestinal inflammation. Non-limiting examples of intestinal inflammation include acute inflammation, diverticulitis, ileal pouch-anal anastomosis, microscopic colitis, infectious diarrhea, and combinations thereof. In some instances, the intestinal inflammation is ruled out based upon the presence or level of C-reactive protein (CRP), lactoferrin, calprotectin, or combinations thereof.

[0075] B. Monitoring IBS

[0076] In another aspect, the present invention provides a method for monitoring the progression or regression of Irritable Bowel Syndrome (IBS) in a subject, said method comprising: (a) determining a first biomarker profile from a first biological sample taken from the subject at a first point in time; (b) determining a second biomarker profile from a second biological sample taken from the subject at a second point in time; and (c) comparing said first and said second biomarker profiles to (i) determine which biomarker profile most resembles or least resembles a first reference profile associated with IBS, (ii) determine which biomarker profile least resembles or most resembles a second reference profile associated with the absence of IBS, or (iii) determining at least two of the foregoing resemblances, wherein said biomarker profiles comprise information about the expression of at least 2 biomarkers found in Table 4, thereby monitoring progression or regression of IBS in said subject. In another embodiment, the biomarker profiles comprise information about the expression of at least 2 biomarkers found in Table 6 such as at least 3, 4, 5, 6, 7, 8, 9, 10, 11, 12, 13, 14, 15, 16, 17, 18, 19, 20, 25, 30, 35, or 40 In a preferred embodiment, the biomarker profiles comprise information about the expression of at least 2 biomarkers found in Table 7 such as at least 3, 4, 5, 6, 7, 8, 9, 10, 11, 12, 13, 14, 15, 16, 17, 18, 19, 20, or 26.

[0077] In some embodiments of the invention, the IBS RNA biomarker is an mRNA or expressed non-coding RNA. In certain embodiments, the method comprises the detection of at least 2 or at least 3, 4, 5, 6, 7, 8, 9, 10, 11, 12, 13, 14, 15, 16, 17, 18, 19, 20, 25, 30, 35, 40, 45, 50, 55, 60, 65, 70, or more of the genes found in Table 4. In another preferred embodiment, the RNA biomarker(s) are found in Table 6 such as at least 1, at least 2 or at least 3, 4, 5, 6, 7, 8, 9, 10, 11, 12, 13, 14, 15, 16, 17, 18, 19, 20, 25, 30, 35, or 40. In a more preferred embodiment, the RNA biomarker(s) are found in Table 7 such as at least 1, at least 2 or at least 3, 4, 5, 6, 7, 8, 9, 10, 11, 12, 13, 14, 15, 16, 17, 18, 19, 20, or 26.

[0078] In one embodiment of the invention, the IBS RNA biomarker is a mRNA molecule encoding a protein having an amino acid sequence of any one of SEQ ID NOS:1 to 75 and 154 to 162. In another embodiment, the IBS RNA biomarker is an RNA molecule comprising a nucleic acid sequence of any one of SEQ ID NOS:76 to 153.

[0079] In a particular embodiment, the IBS RNA biomarker is an RNA molecule transcribed from a gene selected from the group consisting of CCDC147, VIPR1, LPAR5, CCDC144A, GNG3, ACSS2, ZNF33B, PMS2L2, RUSC1, ARHGE, ASIP, OR2L8, PI4K2A, and FOXD3. In a preferred embodiment, the gene is CCDC147, VIPR1, LPAR5, CCDC144A, or GNG3. In another embodiment, the method for monitoring the progression or regression of IBS in a subject comprises detecting a panel of at least about 5 biomarkers. In a preferred embodiment, the markers comprise CCDC147, VIPR1, LPAR5, CCDC144A, and GNG3.

[0080] In certain embodiments, the detection reagent comprises an oligonucleotide and the step of detecting the level of the complex (e.g., via transformation) comprises oligonucleotide hybridization (e.g., microarray or bead-based hybridization assays, xMAP assay, northern blot, dot blot, RNase protection assay, and the like) and/or nucleic acid amplification (e.g., PCR, qPCR, RT-PCR, qRT-PCR, mass spectrometry, and the like). In yet other embodiments, the detection reagent is an antibody and the method of determining the level of complex (e.g., via transformation) in the sample comprises an immunochemical assay (i.e., immunofluorescence assay, ELISA, IFA, and the like).

[0081] The sample used for detecting or determining the presence or level of at least one diagnostic marker is typically whole blood, plasma, serum, saliva, urine, stool (i.e., feces), tears, and any other bodily fluid, or a tissue sample (i.e., biopsy) such as a small intestine or colon sample. Preferably, the sample is serum, whole blood, plasma, stool, urine, or a tissue biopsy. In certain instances, the methods of the present invention further comprise obtaining the sample from the individual prior to detecting or determining the presence or level of at least one diagnostic marker in the sample.

[0082] In certain embodiments, the methods of the present invention comprise determining an RNA IBS biomarker profile in combination with an additional protein or serological IBS biomarker. In some embodiments, the additional diagnostic marker profile is determined by detecting the presence or level of at least one, two, three, four, five, six, seven, eight, nine, ten, or more additional diagnostic markers selected from those found in Table 2, those found in US Patent Publication No. 2008/0085524, filed Aug. 14, 2007, U.S. Provisional Application Ser. No. 61/220,525, filed Jun. 25, 2009, and U.S. Provisional Application Ser. No. 61/256,717, filed Oct. 30, 2009.

[0083] In some embodiments, a panel for measuring one or more of the diagnostic markers described above may be constructed and used for monitoring the progression or regression of IBS in a subject. One skilled in the art will appreciate that the presence or level of a plurality of diagnostic markers can be determined simultaneously or sequentially, using, for example, an aliquot or dilution of the individual's sample. In certain instances, the level of a particular diagnostic marker in the individual's sample is considered to be elevated when it is at least about 25%, 50%, 75%, 100%, 125%, 150%, 175%, 200%, 250%, 300%, 350%, 400%, 450%, 500%, 600%, 700%, 800%, 900%, or 1000% greater than the level of the same marker in a comparative sample (e.g., a normal, GI control, IBS, IBD, and/or Celiac disease sample) or population of samples (e.g., greater than a median level of the same marker in a comparative population of normal, GI control, IBS, IBD, and/or Celiac disease samples).

[0084] In one aspect, a method for monitoring the progression or regression of Irritable Bowel Syndrome (IBS) in a subject comprises determining the level or profile of one or more biomarkers at a first point in time and a second point in time and comparing said levels or profiles. In one embodiment, wherein an elevated level or expression of a biomarker is associated with IBS, a decrease in the level of a biomarker in a sample taken from a subject at a second time, as compared to the expression of the biomarker in a sample taken from the subject at a first time, is indicative of regression of IBS in the subject. In another embodiment, wherein an elevated level or expression of a biomarker is associated with IBS, an increase in the level of a biomarker in a sample taken from a subject at a second time, as compared to the expression of the biomarker in a sample taken from the subject at a first time, is indicative of progression of IBS in the subject.

[0085] In certain other instances, the level of a particular diagnostic marker in the individual's sample is considered to be lowered when it is at least about 5%, 10%, 15%, 20%, 25%, 30%, 35%, 40%, 45%, 50%, 55%, 60%, 65%, 70%, 75%, 80%, 85%, 90%, or 95% less than the level of the same marker in a comparative sample (e.g., a normal, GI control, IBS, IBD, and/or Celiac disease sample) or population of samples (e.g., less than a median level of the same marker in a comparative population of normal, GI control, IBS, IBD, and/or Celiac disease samples).

[0086] In another embodiment, wherein a reduced level or expression of a biomarker is associated with IBS, an increase in the level of a biomarker in a sample taken from a subject at a second time, as compared to the expression of the biomarker in a sample taken from the subject at a first time, is indicative of regression of IBS in the subject. In another embodiment, wherein a reduced level or expression of a biomarker is associated with IBS, a decrease in the level of a biomarker in a sample taken from a subject at a second time, as compared to the expression of the biomarker in a sample taken from the subject at a first time, is indicative of progression of IBS in the subject.

[0087] In yet other embodiments, an IBS marker is considered to be differentially expressed when the magnitude its log2 fold change (i.e., positive or negative value) is at least about 0.5, 0.6, 0.7, 0.8, 0.9, 1.0, 1.1, 1.2, 1.3, 1.4, 1.5, 1.6, 1.7, 1.8, 1.9, 2.0, 2.1, 2.2, 2.3, 2.4, 2.5, 2.6, 2.7, 2.8, 2.9, 3.0 or greater, with respect to the same marker in a comparative population of normal, GI control, IBS, IBD, and/or Celiac disease samples. In a preferred embodiment, the magnitude of a differentially expressed IBS biomarker is at least about 1.0, more preferably at least about 1.5, and most preferably at least about 2.5.

[0088] In some embodiments, the method of monitoring the progression or regression of IBS in a subject comprises determining a diagnostic marker profile optionally in combination with a symptom profile, wherein the symptom profile is determined by identifying the presence or severity of at least one symptom in the individual at a first point in time; identifying the presence or severity of at least one symptom in the individual at a second point in time; comparing the presence or severity of the at least one symptom profile at said first point in time and said second point in time; a determining if there has been progression or regression of IBS in the individual using an algorithm based upon the diagnostic marker profile and the symptom profile. One skilled in the art will appreciate that the diagnostic marker profile and the symptom profile can be determined simultaneously or sequentially in any order.

[0089] In some embodiments, the method of monitoring the progression or regression of IBS in a subject comprises determining a diagnostic marker profile optionally in combination with a symptom profile, wherein the symptom profile is determined by identifying the presence or severity of at least one symptom in the individual; and classifying the sample as an IBS sample or non-IBS sample using an algorithm based upon the diagnostic marker profile and the symptom profile. One skilled in the art will appreciate that the diagnostic marker profile and the symptom profile can be determined simultaneously or sequentially in any order.

[0090] In some embodiments, monitoring the progression or regression of IBS in a subject is based upon the diagnostic marker profile, alone or in combination with a symptom profile, in conjunction with a statistical algorithm. In certain instances, the statistical algorithm is a learning statistical classifier system. The learning statistical classifier system can be selected from the group consisting of a random forest (RF), classification and regression tree (C&RT), boosted tree, neural network (NN), support vector machine (SVM), general chi-squared automatic interaction detector model, interactive tree, multiadaptive regression spline, machine learning classifier, and combinations thereof. Preferably, the learning statistical classifier system is a tree-based statistical algorithm (e.g., RF, C&RT, etc.) and/or a NN (e.g., artificial NN, etc.).

[0091] In certain instances, the statistical algorithm is a single learning statistical classifier system. Preferably, the single learning statistical classifier system comprises a tree-based statistical algorithm such as a RF or C&RT. As a non-limiting example, a single learning statistical classifier system can be used to monitor the progression or regression of IBS in a subject based upon a prediction or probability value and the presence or level of at least one diagnostic marker (i.e., diagnostic marker profile), alone or in combination with the presence or severity of at least one symptom (i.e., symptom profile). The use of a single learning statistical classifier system typically classifies the sample as a progressing or regressing IBS sample with a sensitivity, specificity, positive predictive value, negative predictive value, and/or overall accuracy of at least about 75%, 76%, 77%, 78%, 79%, 80%, 81%, 82%, 83%, 84%, 85%, 86%, 87%, 88%, 89%, 90%, 91%, 92%, 93%, 94%, 95%, 96%, 97%, 98%, or 99%.

[0092] In certain other instances, the statistical algorithm is a combination of at least two learning statistical classifier systems. Preferably, the combination of learning statistical classifier systems comprises a RF and a NN, e.g., used in tandem or parallel. As a non-limiting example, a RF can first be used to generate a prediction or probability value based upon the diagnostic marker profile, alone or in combination with a symptom profile, and a NN can then be used to determine if the sample corresponds to a progression or regression of IBS based upon the prediction or probability value and the same or different diagnostic marker profile or combination of profiles. Advantageously, the hybrid RF/NN learning statistical classifier system of the present invention classifies the sample as a progressing or regressing IBS sample with a sensitivity, specificity, positive predictive value, negative predictive value, and/or overall accuracy of at least about 75%, 76%, 77%, 78%, 79%, 80%, 81%, 82%, 83%, 84%, 85%, 86%, 87%, 88%, 89%, 90%, 91%, 92%, 93%, 94%, 95%, 96%, 97%, 98%, or 99%.

[0093] In some instances, the data obtained from using the learning statistical classifier system or systems can be processed using a processing algorithm. Such a processing algorithm can be selected, for example, from the group consisting of a multilayer perceptron, backpropagation network, and Levenberg-Marquardt algorithm. In other instances, a combination of such processing algorithms can be used, such as in a parallel or serial fashion.

[0094] In certain other embodiments, the methods of the present invention further comprise sending the IBS classification results to a clinician, e.g., a gastroenterologist or a general practitioner. In another embodiment, the methods of the present invention provide a diagnosis in the form of a probability that IBS is progressing or regressing in the subject. For example, the individual can have about a 0%, 5%, 10%, 15%, 20%, 25%, 30%, 35%, 40%, 45%, 50%, 55%, 60%, 65%, 70%, 75%, 80%, 85%, 90%, 95%, or greater probability of having IBS that is progressing or regressing. In yet another embodiment, the methods of the present invention further provide a prognosis of IBS in the individual. For example, the prognosis can be surgery, development of a category or clinic al subtype of IBS, development of one or more symptoms, or recovery from the disease.

[0095] In some embodiments, the diagnosis of an individual as having IBS is followed by administering to the individual a therapeutically effective amount of a drug useful for treating one or more symptoms associated with IBS. Suitable IBS drugs include, but are not limited to, serotonergic agents, antidepressants, chloride channel activators, chloride channel blockers, guanylate cyclase agonists, antibiotics, opioid agonists, neurokinin antagonists, antispasmodic or anticholinergic agents, belladonna alkaloids, barbiturates, GLP-1 analogs, CRF antagonists, probiotics, free bases thereof, pharmaceutically acceptable salts thereof, derivatives thereof, analogs thereof, and combinations thereof. Other IBS drugs include bulking agents, dopamine antagonists, carminatives, tranquilizers, dextofisopam, phenytoin, timolol, and diltiazem. Additionally, amino acids like glutamine and glutamic acid which regulate intestinal permeability by affecting neuronal or glial cell signaling can be administered to treat patients with IBS.

[0096] The methods of the present invention can further comprise administering to the individual a therapeutically effective amount of a drug useful for treating IBS-A, IBS-C, IBS-D, IBS-M, or IBS-PI. Suitable drugs include, but are not limited to, tegaserod (Zelnorm), alosetron (Lotronex®), lubiprostone (Amitiza), rifamixin (Xifaxan), MD-1100, probiotics, and a combination thereof. In instances where the sample is classified as an IBS-A or IBS-C sample and/or the individual is diagnosed with IBS-A or IBS-C, a therapeutically effective dose of tegaserod or other 5-HT₄ agonist (e.g., mosapride, renzapride, AG1-001, etc.) can be administered to the individual. In some instances, when the sample is classified as IBS-C and/or the individual is diagnosed with IBS-C, a therapeutically effective amount of lubiprostone or other chloride channel activator, rifamixin or other antibiotic capable of controlling intestinal bacterial overgrowth, MD-1100 or other guanylate cyclase agonist, asimadoline or other opioid agonist, or talnetant or other neurokinin antagonist can be administered to the individual. In other instances, when the sample is classified as IBS-D and/or the individual is diagnosed with IBS-D, a therapeutically effective amount of alosetron or other 5-HT₃ antagonist (e.g., ramosetron, DDP-225, etc.), crofelemer or other chloride channel blocker, talnetant or other neurokinin antagonist (e.g., saredutant, etc.), or an antidepressant such as a tricyclic antidepressant can be administered to the individual.

[0097] In one embodiment, the method for monitoring the progression or regression of IBS may comprise monitoring a subject who has been administered a therapy for IBS, for example a subject who has been administered a therapy for IBS during the intervening time between the collection of a first biological sample and the collection of a second biological sample. Accordingly, in one embodiment the method for monitoring the progression or regression of IBS is useful for evaluating the clinical efficacy of a therapy for IBS.

[0098] In one embodiment, wherein an elevated level or expression of a biomarker is associated with IBS, a decrease in the level of a biomarker in a sample taken from a subject at a time point after the administration of a therapy for IBS, as compared to the expression of the biomarker in a sample taken from the subject at a time point prior to administration of the therapy, is indicative of the efficacy of the therapy. In another embodiment, wherein an elevated level or expression of a biomarker is associated with IBS, an increase in the level of a biomarker in a sample taken from a subject at a time point after the administration of a therapy for IBS, as compared to the expression of the biomarker in a sample taken from the subject at a time point prior to administration of the therapy, is indicative of the lack of efficacy of the therapy.

[0099] In another embodiment, wherein a reduced level or expression of a biomarker is associated with IBS, an increase in the level of a biomarker in a sample taken from a subject at a time point after the administration of a therapy for IBS, as compared to the expression of the biomarker in a sample taken from the subject at a time point prior to administration of the therapy, is indicative of the efficacy of the therapy. In yet another embodiment, wherein a reduced level or expression of a biomarker is associated with IBS, a reduction in the level of a biomarker in a sample taken from a subject at a time point after the administration of a therapy for IBS, as compared to the expression of the biomarker in a sample taken from the subject at a time point prior to administration of the therapy, is indicative of the lack of efficacy of the therapy.

[0100] After determining the efficacy of an IBS therapy in a subject, the method may further comprise continued administration of the therapy, in the case that the subject is responsive to the therapy, or alternatively may comprise discontinuing, altering, and/or administering alternative therapy to the subject, in the case that the subject is not responsive to the therapy.

[0101] C. Assigning Therapy for IBS

[0102] In another aspect, the present invention provides a method for assigning therapy for IBS to a subject in need thereof, the method comprising (a) isolating and/or amplifying RNA from a biological sample taken from the subject; (b) contacting the isolated and/or amplified RNA with a detection reagent under conditions suitable to transform the detection reagent into a complex comprising the detection reagent and an IBS RNA biomarker; (c) detecting the level of the complex; (d) determining if the level of the complex more closely resembles a first reference level associated with IBS or a second reference level associated with an absence of IBS; and (e) assigning therapy for IBS if said level more closely resembles said first reference level associated with IBS, wherein the IBS RNA biomarker is selected from the group consisting of those found in Table 4. In a preferred embodiment, the RNA biomarker(s) are found in Table 6 such as at least 1, at least 2 or at least 3, 4, 5, 6, 7, 8, 9, 10, 11, 12, 13, 14, 15, 16, 17, 18, 19, 20, 25, 30, 35, or 40. In a more preferred embodiment, the RNA biomarker(s) are found in Table 7 such as at least 1, at least 2 or at least 3, 4, 5, 6, 7, 8, 9, 10, 11, 12, 13, 14, 15, 16, 17, 18, 19, 20, or 26.

[0103] In some embodiments of the invention, the IBS RNA biomarker is an mRNA or expressed non-coding RNA. In certain embodiments, the method comprises the detection of at least 2 or at least 3, 4, 5, 6, 7, 8, 9, 10, 11, 12, 13, 14, 15, 16, 17, 18, 19, 20, 25, 30, 35, 40, 45, 50, 55, 60, 65, 70, or more of the genes found in Table 4. In a preferred embodiment, the method comprises the detection of at least 2 or at least 3, 4, 5, 6, 7, 8, 9, 10, 11, 12, 13, 14, 15, 16, 17, 18, 19, 20, 25, 30, 35, or 40 of the genes found in Table 6. In a preferred embodiment, the RNA biomarker(s) are found in Table 6 such as at least 1, at least 2 or at least 3, 4, 5, 6, 7, 8, 9, 10, 11, 12, 13, 14, 15, 16, 17, 18, 19, 20, 25, 30, 35, or 40. In a more preferred embodiment, the method comprises the detection of at least 2 or at least 3, 4, 5, 6, 7, 8, 9, 10, 11, 12, 13, 14, 15, 16, 17, 18, 19, 20, 25, or all 26 of the genes found in Table 7.

[0104] In one embodiment of the invention, the IBS RNA biomarker is a mRNA molecule encoding a protein having an amino acid sequence of any one of SEQ ID NOS:1 to 75 and 154 to 162. In another embodiment, the IBS RNA biomarker is an RNA molecule comprising a nucleic acid sequence of any one of SEQ ID NOS:76 to 153.

[0105] In a particular embodiment, the IBS RNA biomarker is an RNA molecule transcribed from a gene selected from the group consisting of CCDC147, VIPR1, LPAR5, CCDC144A, GNG3, ACSS2, ZNF33B, PMS2L2, RUSC1, ARHGE, ASIP, OR2L8, PI4K2A, and FOXD3. In a preferred embodiment, the gene is CCDC147, VIPR1, LPAR5, CCDC144A, or GNG3. In another embodiment, the method for assigning therapy for IBS to a subject in need thereof comprises detecting a panel of at least about 5 biomarkers. In a preferred embodiment, the markers comprise CCDC147, VIPR1, LPAR5, CCDC144A, and GNG3.

[0106] In certain embodiments, the detection reagent comprises an oligonucleotide and the step of detecting the level of the complex (e.g., via transformation) comprises oligonucleotide hybridization (e.g., microarray or bead-based hybridization assays, xMAP assay, northern blot, dot blot, RNase protection assay, and the like) and/or nucleic acid amplification (e.g., PCR, qPCR, RT-PCR, qRT-PCR, mass spectrometry, and the like). In yet other embodiments, the detection reagent is an antibody and the method of determining the level of complex (e.g., via transformation) in the sample comprises an immunochemical assay (i.e., immunofluorescence assay, ELISA, IFA, and the like).

[0107] The sample used for detecting or determining the presence or level of at least one diagnostic marker is typically whole blood, plasma, serum, saliva, urine, stool (i.e., feces), tears, and any other bodily fluid, or a tissue sample (i.e., biopsy) such as a small intestine or colon sample. Preferably, the sample is serum, whole blood, plasma, stool, urine, or a tissue biopsy. In certain instances, the methods of the present invention further comprise obtaining the sample from the individual prior to detecting or determining the presence or level of at least one diagnostic marker in the sample.

[0108] In certain embodiments, the methods of the present invention comprise determining an RNA IBS biomarker profile in combination with an additional protein or serological IBS biomarker. In some embodiments, the additional diagnostic marker profile is determined by detecting the presence or level of at least one, two, three, four, five, six, seven, eight, nine, ten, or more additional diagnostic markers selected from those found in Table 2, those found in US Patent Publication No. 2008/0085524, filed Aug. 14, 2007, U.S. Provisional Application Ser. No. 61/220,525, filed Jun. 25, 2009, and U.S. Provisional Application Ser. No. 61/256,717, filed Oct. 30, 2009.

[0109] In some embodiments, a panel for measuring one or more of the diagnostic markers described above may be constructed and used for assigning therapy for IBS to a subject in need thereof. One skilled in the art will appreciate that the presence or level of a plurality of diagnostic markers can be determined simultaneously or sequentially, using, for example, an aliquot or dilution of the individual's sample. In certain instances, the level of a particular diagnostic marker in the individual's sample is considered to be elevated when it is at least about 25%, 50%, 75%, 100%, 125%, 150%, 175%, 200%, 250%, 300%, 350%, 400%, 450%, 500%, 600%, 700%, 800%, 900%, or 1000% greater than the level of the same marker in a comparative sample (e.g., a normal, GI control, IBS, IBD, and/or Celiac disease sample) or population of samples (e.g., greater than a median level of the same marker in a comparative population of normal, GI control, IBS, IBD, and/or Celiac disease samples). In certain other instances, the level of a particular diagnostic marker in the individual's sample is considered to be lowered when it is at least about 5%, 10%, 15%, 20%, 25%, 30%, 35%, 40%, 45%, 50%, 55%, 60%, 65%, 70%, 75%, 80%, 85%, 90%, or 95% less than the level of the same marker in a comparative sample (e.g., a normal, GI control, IBS, IBD, and/or Celiac disease sample) or population of samples (e.g., less than a median level of the same marker in a comparative population of normal, GI control, IBS, IBD, and/or Celiac disease samples). In yet other embodiments, an IBS marker is considered to be differentially expressed when the magnitude its log2 fold change (i.e., positive or negative value) is at least about 0.5, 0.6, 0.7, 0.8, 0.9, 1.0, 1.1, 1.2, 1.3, 1.4, 1.5, 1.6, 1.7, 1.8, 1.9, 2.0, 2.1, 2.2, 2.3, 2.4, 2.5, 2.6, 2.7, 2.8, 2.9, 3.0 or greater, with respect to the same marker in a comparative population of normal, GI control, IBS, IBD, and/or Celiac disease samples. In a preferred embodiment, the magnitude of a differentially expressed IBS biomarker is at least about 1.0, more preferably at least about 1.5, and most preferably at least about 2.5.

[0110] In some embodiments, the method of assigning therapy for IBS comprises determining a diagnostic marker profile optionally in combination with a symptom profile, wherein the symptom profile is determined by identifying the presence or severity of at least one symptom in the individual; and assigning therapy for IBS using an algorithm based upon the diagnostic marker profile and the symptom profile. One skilled in the art will appreciate that the diagnostic marker profile and the symptom profile can be determined simultaneously or sequentially in any order.

[0111] In some embodiments, assigning therapy for IBS is based upon the diagnostic marker profile, alone or in combination with a symptom profile, in conjunction with a statistical algorithm. In certain instances, the statistical algorithm is a learning statistical classifier system. The learning statistical classifier system can be selected from the group consisting of a random forest (RF), classification and regression tree (C&RT), boosted tree, neural network (NN), support vector machine (SVM), general chi-squared automatic interaction detector model, interactive tree, multiadaptive regression spline, machine learning classifier, and combinations thereof. Preferably, the learning statistical classifier system is a tree-based statistical algorithm (e.g., RF, C&RT, etc.) and/or a NN (e.g., artificial NN, etc.).

[0112] In certain instances, the statistical algorithm is a single learning statistical classifier system. Preferably, the single learning statistical classifier system comprises a tree-based statistical algorithm such as a RF or C&RT. As a non-limiting example, a single learning statistical classifier system can be used to assign therapy for IBS based upon a prediction or probability value and the presence or level of at least one diagnostic marker (i.e., diagnostic marker profile), alone or in combination with the presence or severity of at least one symptom (i.e., symptom profile). The use of a single learning statistical classifier system typically classifies the sample as an IBS sample with a sensitivity, specificity, positive predictive value, negative predictive value, and/or overall accuracy of at least about 75%, 76%, 77%, 78%, 79%, 80%, 81%, 82%, 83%, 84%, 85%, 86%, 87%, 88%, 89%, 90%, 91%, 92%, 93%, 94%, 95%, 96%, 97%, 98%, or 99%.

[0113] In certain other instances, the statistical algorithm is a combination of at least two learning statistical classifier systems. Preferably, the combination of learning statistical classifier systems comprises a RF and a NN, e.g., used in tandem or parallel. As a non-limiting example, a RF can first be used to generate a prediction or probability value based upon the diagnostic marker profile, alone or in combination with a symptom profile, and a NN can then be used to assigning therapy for IBS based upon the prediction or probability value and the same or different diagnostic marker profile or combination of profiles. Advantageously, the hybrid RF/NN learning statistical classifier system of the present invention classifies the sample as an IBS sample with a sensitivity, specificity, positive predictive value, negative predictive value, and/or overall accuracy of at least about 75%, 76%, 77%, 78%, 79%, 80%, 81%, 82%, 83%, 84%, 85%, 86%, 87%, 88%, 89%, 90%, 91%, 92%, 93%, 94%, 95%, 96%, 97%, 98%, or 99%.

[0114] In some instances, the data obtained from using the learning statistical classifier system or systems can be processed using a processing algorithm. Such a processing algorithm can be selected, for example, from the group consisting of a multilayer perceptron, backpropagation network, and Levenberg-Marquardt algorithm. In other instances, a combination of such processing algorithms can be used, such as in a parallel or serial fashion.

[0115] In certain other embodiments, the methods of the present invention further comprise sending the assignment of a therapy to a clinician, e.g., a gastroenterologist or a general practitioner. In another embodiment, the methods of the present invention provide therapeutic assignments in the form of a probability that the individual will respond to the particular therapy assigned. For example, the individual can have about a 0%, 5%, 10%, 15%, 20%, 25%, 30%, 35%, 40%, 45%, 50%, 55%, 60%, 65%, 70%, 75%, 80%, 85%, 90%, 95%, or greater probability of responding to the therapy. In yet another embodiment, the methods of the present invention further provide a prognosis of therapy in the individual. For example, the prognosis can be surgery, development of a category or clinic al subtype of IBS, development of one or more symptoms, regression of IBS, progression of IBS, or recovery from the disease.

[0116] In some embodiments, the assignment of a therapy is followed by administering to the individual a therapeutically effective amount of a drug useful for treating one or more symptoms associated with IBS (i.e., administration of the assigned therapy). Suitable IBS drugs include, but are not limited to, serotonergic agents, antidepressants, chloride channel activators, chloride channel blockers, guanylate cyclase agonists, antibiotics, opioid agonists, neurokinin antagonists, antispasmodic or anticholinergic agents, belladonna alkaloids, barbiturates, GLP-1 analogs, CRF antagonists, probiotics, free bases thereof, pharmaceutically acceptable salts thereof, derivatives thereof, analogs thereof, and combinations thereof. Other IBS drugs include bulking agents, dopamine antagonists, carminatives, tranquilizers, dextofisopam, phenytoin, timolol, and diltiazem. Additionally, amino acids like glutamine and glutamic acid which regulate intestinal permeability by affecting neuronal or glial cell signaling can be administered to treat patients with IBS.

[0117] In other embodiments, the methods of the present invention further comprise classifying the IBS sample as an IBS-constipation (IBS-C), IBS-diarrhea (IBS-D), IBS-mixed (IBS-M), IBS-alternating (IBS-A), or post-infectious IBS (IBS-PI) sample. In certain instances, the classification of the IBS sample into a category, form, or clinical subtype of IBS is based upon the presence or level of at least one, two, three, four, five, six, seven, eight, nine, ten, or more classification markers. Non-limiting examples of classification markers are described below. Preferably, at least one form of IBS is distinguished from at least one other form of IBS based upon the presence or level of leptin. In certain instances, the methods of the present invention can be used to differentiate an IBS-C sample from an IBS-A and/or IBS-D sample in an individual previously identified as having IBS. In certain other instances, the methods of the present invention can be used to classify a sample from an individual not previously diagnosed with IBS as an IBS-A sample, IBS-C sample, IBS-D sample, or non-IBS sample.

[0118] In certain embodiments, the methods further comprise sending the results from the classification to a clinician. In certain other embodiments, the methods further provide a diagnosis in the form of a probability that the individual has IBS-A, IBS-C, IBS-D, IBS-M, or IBS-PI. The methods of the present invention can further comprise administering to the individual a therapeutically effective amount of a drug useful for treating IBS-A, IBS-C, IBS-D, IBS-M, or IBS-PI. Suitable drugs include, but are not limited to, tegaserod (Zelnorm), alosetron (Lotronex®), lubiprostone (Amitiza), rifamixin (Xifaxan), MD-1100, probiotics, and a combination thereof. In instances where the sample is classified as an IBS-A or IBS-C sample and/or the individual is diagnosed with IBS-A or IBS-C, a therapeutically effective dose of tegaserod or other 5-HT₄ agonist (e.g., mosapride, renzapride, AG1-001, etc.) can be administered to the individual. In some instances, when the sample is classified as IBS-C and/or the individual is diagnosed with IBS-C, a therapeutically effective amount of lubiprostone or other chloride channel activator, rifamixin or other antibiotic capable of controlling intestinal bacterial overgrowth, MD-1100 or other guanylate cyclase agonist, asimadoline or other opioid agonist, or talnetant or other neurokinin antagonist can be administered to the individual. In other instances, when the sample is classified as IBS-D and/or the individual is diagnosed with IBS-D, a therapeutically effective amount of alosetron or other 5-HT₃ antagonist (e.g., ramosetron, DDP-225, etc.), crofelemer or other chloride channel blocker, talnetant or other neurokinin antagonist (e.g., saredutant, etc.), or an antidepressant such as a tricyclic antidepressant can be administered to the individual.

[0119] D. Determination of a Symptom Profile

[0120] The symptom profile is typically determined by identifying the presence or severity of at least one symptom selected from the group consisting of chest pain, chest discomfort, heartburn, uncomfortable fullness after having a regular-sized meal, inability to finish a regular-sized meal, abdominal pain, abdominal discomfort, constipation, diarrhea, bloating, abdominal distension, negative thoughts or feelings associated with having pain or discomfort, and combinations thereof.

[0121] In preferred embodiments, the presence or severity of 1, 2, 3, 4, 5, 6, 7, 8, 9, 10, or more of the symptoms described herein is identified to generate a symptom profile that is useful for diagnosing IBS, ruling in IBS, ruling out IBD, predicting IBS, monitoring the progression or regression of IBS, providing a prognosis for IBS, assigning therapy for IBS, and the like. In certain instances, a questionnaire or other form of written, verbal, or telephone survey is used to produce the symptom profile. The questionnaire or survey typically comprises a standardized set of questions and answers for the purpose of gathering information from respondents regarding their current and/or recent IBS-related symptoms. For instance, Example 13 from US Patent Publication No. 2008/0085524 provides exemplary questions that can be included in a questionnaire for identifying the presence or severity of one or more IBS-related symptoms in the individual.

[0122] In certain embodiments, the symptom profile is produced by compiling and/or analyzing all or a subset of the answers to the questions set forth in the questionnaire or survey. In certain other embodiments, the symptom profile is produced based upon the individual's response to the following question: “Are you currently experiencing any symptoms?” The symptom profile generated in accordance with either of these embodiments can be used in combination with a diagnostic marker profile in the algorithmic-based methods described herein to improve the accuracy of diagnosing IBS, ruling in IBS, ruling out IBD, predicting IBS, monitoring the progression or regression of IBS, providing a prognosis for IBS, assigning therapy for IBS, and the like.

### IV. Diagnostic Markers

[0123] As provided herein, 66 genes were identified with transcripts detected as present in at least 20% of the samples that varied greater than 2-fold between IBS and normal subjects. Among the most significantly elevated transcripts in IBS were pain, inflammation, and gut permeability related genes, including TACR2, SH3GRL3, MICALL1, Rab7L1, VIPR1. TACR2 is a receptor for the tachykinin neuropeptide substance K (neurokinin A). It is associated with G proteins that activate a phosphatidylinositol-calcium second messenger system. Ibodutant is a tachykinin NK2 receptor (TACR2) antagonist currently under phase II clinical trials for IBS. Serotonin triggers contractions in the rabbit ileum by mediate neuronal excitation. Antagonists for neurokinin (NK1 and NK2) receptors partially blocked the serotonin response. VIPR1 is a receptor for VIP. The activity of this receptor is mediated by G proteins which activate adenylyl cyclase. VIP concentration is elevated in serum of IBS patients. Another interesting DEG is MICALL1, which is a cytoskeletal regulator binding to Rab13. MICALL1/Rab13 interaction has been reported to be involved in integrin trafficking to cell surface. Integrin is an important mediator in leukocyte infiltration to the intestine in an inflammatory condition. Increased leukocyte infiltration has been observed in a subset of IBS patients. While those above genes may have biology relevance to IBS, other DEGs with unknown biology functions were identified, for example, CCDC147 is coiled-coil containing protein with undefined biological functions. Since IBS is a complex disease and its etiology remain to be defined, such gene may warrant future studies for IBS research. The unchanged levels of many other genes in the same family suggested that a specific, rather than global activation of those pathways constituted an important part of the disease signature in IBS peripheral blood.

[0124] IBS is not associated with any definitive biochemical, structural, or serologic abnormalities that define its presence. The hallmark feature of IBS is abdominal pain or discomfort associated with altered bowel habits, and, often, the abdominal pain prompts patients to seek medical care. Because the symptoms of IBS are common to a number of other GI conditions, IBS was long considered a “diagnosis of exclusion,” leading to excessive testing of patients with characteristic symptoms. Fortunately, advances in research have increased our understanding of IBS pathophysiology, which enabled the development of biologically relevant biomarkers and the development of consensus guidelines advocating a positive diagnosis of IBS based primarily on the pathways involved in the disease and transcript alteration in IBS patients. The identification of gene expression biomarkers with biological relevance such TACR2 and VIPR1 will further enhance our understanding of the pathogenesis of IBS.

[0125] The biomarkers provided herein, identified from peripheral blood cells, do not overlap with the published biomarkers identified using gut biopsy tissues. The general limitations of relying on a surrogate end point or a putative surrogate is the possibility of lacking biological relevance of “surrogate markers”. As an example, change in expression of TACR2 in peripheral blood cells may not correlate with change of TACR2 expression in gut tissue, especially in enteric neuron cells, where the pain response is initiated and transmitted. Although gene expression profiling using intestinal tissues is a better measurement for predicting IBS, it is not a feasible test for diagnosis of IBS. Future studies will be performed to compare expression of selected genes using matching peripheral blood and intestinal biopsy tissues.

[0126] In the initial gene chip study, only IBS-C and IBS-D patient samples were used (Example 2). The selected genes were validated in IBS-M patient samples using qPCR (Example 5). The relative expression of individual genes vary among the 3 subtypes of IBS, the overall patterns of most DEGs are consistent among the 3 subtypes. Since clinical assignment of IBS subtypes is straightforward base on symptoms of diarrhea, constipation, or mixed types, the focus of this study is to identify genes which are universally regulated in all 3 subtypes.

[0127] IBS presents a diagnostic challenge because symptoms overlap with those of other GI disorders such as inflammatory bowel disease, Celiac disease, biliary tract disease, peptic ulcer disease, colorectal carcinoma. Co-morbidities further complicate the diagnosis. Lack of “Gold Standard” has made it very difficult for developing a diagnostic test. In the examples provided herein, the samples were collected by leading GI physicians specialized in IBS diagnosis and treatment. In order to avoid confounding markers which may be associated with co-morbidities, patients who have other GI disorders and psychiatric diseases were excluded. The samples we used for this study were from “homogenous” IBS patient population.

[0128] As clinical pharmacogenomic analysis gain acceptance and become more commonplace in clinical trials, it is increasingly evident that microarrays is commonly used as diagnostic devices. One of the importance issues is to establish a rigorous and numerically based method for reporting expression pattern results from a diagnostic assay and how an associated reference range for that pattern is calculated and reported. In one embodiment, the weighted voting method may be used to collapse expression pattern results from many genes into a single numerical confidence score. On important advantage is that it reports a predictive strength score, indicative of the confidence on the prediction for each patient. In the future average confidence scores collected for the accumulating pool of correctly diagnosed patients and correctly nondiagnosed disease-free individuals could be calculated, and a reference range of values for the particular predictive gene set diagnostic in question, could be reported.

[0129] As such, in one embodiment, the present invention establishes that there exists disease associated gene signature in peripheral blood of IBS patients. It is possible that because blood circulates throughout the body, their expression profile may serve as a sensitive indicator and physiological monitor of disease and health.

[0130] A. RNA Markers

[0131] A variety of diagnostic markers are suitable for use in the methods, systems, and code of the present invention for classifying a sample from an individual as an IBS sample or for ruling out one or more diseases or disorders associated with IBS-like symptoms in a sample from an individual. Examples of diagnostic markers include, without limitation, any of the genes, expressed RNAs, or proteins found differentially expressed in IBS or an IBS-subtype, for example those found in Table 1, Table 4, Table 5, Table 6, or Table 7. In a particular embodiment, a diagnostic marker useful in the methods, systems, and code of the present invention is a gene, expressed RNA, or protein found in Table 1. In a preferred embodiment, a diagnostic marker useful in the methods, systems, and code of the present invention is a gene, expressed RNA, or protein found in Table 6. In a more preferred embodiment, a diagnostic marker useful in the methods, systems, and code of the present invention is a gene, expressed RNA, or protein found in Table 7. In one embodiment of the invention, the biomarker is an mRNA molecule encoding a protein having an amino acid sequence of any one of SEQ ID NOS:1 to 75 and 154 to 162. In a related embodiment, the biomarker is an RNA molecule comprising a nucleic acid sequence of any one of SEQ ID NOS:76 to 153.

[0132] In a preferred embodiment of the invention, an IBS RNA biomarker comprises an RNA (e.g., mRNA) expressed from a gene selected from CCDC147, VIPR1, LPAR5, CCDC144A, GNG3, ACSS2, ZNF33B, PMS2L2, RUSC1, ARHGE, ASIP, OR2L8, PI4K2A, and FOXD3. In a related embodiment, the biomarker may be a protein or polypeptide encoded by a gene selected from those found in Table 4. In a preferred embodiment, the biomarker may be a protein or polypeptide encoded by a gene selected from those found in Table 6. In a more preferred embodiment, the biomarker may be a protein or polypeptide encoded by a gene selected from those found in Table 7. In a particular embodiment, the protein is encoded by a gene selected from CCDC147, VIPR1, LPAR5, CCDC144A, GNG3, ACSS2, ZNF33B, PMS2L2, RUSC1, ARHGE, ASIP, OR2L8, PI4K2A, and FOXD3.

[0133] In a most preferred embodiment, a biomarker of the invention is encoded by a gene selected from CCDC147, VIPR1, LPAR5, CCDC144A, and GNG3. In one embodiment, the methods of the invention comprise the detection of at least two, three, four, or all of CCDC147, VIPR1, LPAR5, CCDC144A, and GNG3. In certain embodiments, the biomarker is an RNA (e.g., mRNA). In other embodiments, the biomarker is a protein or polypeptide encoded by an IBS RNA biomarker.

### 1. CCDC147 Coiled-Coil Domain Containing 147 (CCDC147)

[0134] CCDC147 is a 104 kDa protein (NP_{—}001008723 (SEQ ID NO:144)) encoded by the CCDC147 gene (Entrez GeneID: 159686; NM_{—}001008723 (SEQ ID NO:75)). Little is known about the biology of CCDC147. qRT-PCR validation studies of peripheral blood samples from 98 patients with IBS indicate that CCDC147 is highly predictive of IBS, and in particular of the IBS-D subtype (Example 4). In certain embodiments, CCDC147 and/or an mRNA encoding CCDC147 are useful biomarkers for IBS.

[0135] In certain instances, the presence or level of CCDC147 or a precursor thereof, is detected at the level of mRNA expression with an assay (e.g., via transformation) such as, e.g., a hybridization assay, an amplification-based assay, e.g. qPCR assay, RT-PCR assay, or a mass spectrometry based assay. In certain other instances, the presence or level of CCDC147 is detected at the level of protein expression (e.g., via transformation) using, e.g., an immunoassay (e.g., ELISA), an immunohistochemical assay, or a mass spectrometry based assay.

### 2. Vasoactive Intestinal Peptide Receptor 1 (VIPR1)

[0136] VIPR1 is a 7 transmembrane domain neuropeptide receptor that interacts with the vasoative intestinal peptide (VIP). VIPR1 is found in a number of tissues including brain, peripheral blood leukocytes, and small intestine. Notably, VIP induces smooth muscle relaxation, causes inhibition of gastric acids secretion and absorption from the intestinal lumen, and stimulates the secretion of water into pancreatic juice and bile. VIPR1 is a 48.5 kDa transmembrane protein encoded by the vasoactive intestinal peptide receptor 1 gene (Entrez GeneID: 7433; NM_{—}004624 (SEQ ID NO:58)) and is produced after processing of the vasoactive intestinal peptide receptor 1 precursor polypeptide (NP_{—}004615 (SEQ ID NO:127)). qRT-PCR validation studies of peripheral blood samples from 98 patients with IBS indicate that VIPR1 is highly predictive of IBS, and in particular of the IBS-D subtype (Example 4). In certain embodiments, VIPR1, a VIPR1 precursor protein, and/or an mRNA encoding VIPR1 are useful biomarkers for IBS.

[0137] In certain instances, the presence or level of VIPR1 is detected at the level of mRNA expression (e.g., via transformation) with an assay such as, e.g., a hybridization assay, an amplification-based assay, e.g. qPCR assay, RT-PCR assay, or a mass spectrometry based assay. In certain other instances, the presence or level of VIPR1, or a precursor thereof, is detected at the level of protein expression using, e.g., an immunoassay (e.g., ELISA), an immunohistochemical assay, or a mass spectrometry based assay. Suitable ELISA kits for determining the presence or level of VIPR1 in a serum, plasma, saliva, or urine sample are available from, e.g., Sigma-Aldrich (St. Louis, Mo.), US Biological (Swampscott, Mass.), and Novus Biologicals (Littleton, Colo.).

### 3. Lysophosphatidic Acid Receptor 5 (GPR98; LPAR5)

[0138] LPAR5 is a 7 transmembrane domain G protein-coupled receptor that transmits extracellular signals from lysophosphatidic acid to cells through heterotrimeric G proteins. LPAR5 interacts with a number of signaling molecules including farnesyl pyrophosphate (FPP), N-arachidonylglycine (NAG), and lysophosphatidic acid. LPAR is a 41.3 kDa transmembrane protein (NP_{—}065133 (SEQ ID NOS:84 and 85)) that is encoded by the lysophosphatidic acid receptor 5 gene (Entrez GeneID: 57121; NM_{—}020400 (SEQ ID NO:9); NM_{—}001142961 (SEQ ID NO:10)). qRT-PCR validation studies of peripheral blood samples from 98 patients with IBS indicate that LPAR5 is highly predictive of IBS, and in particular of the IBS-D subtype (Example 4). In certain embodiments, LPAR5 and/or an mRNA encoding LPAR5 are useful biomarkers for IBS.

[0139] In certain instances, the presence or level of LPAR5 or a precursor thereof, is detected at the level of mRNA expression (e.g., via transformation) with an assay such as, e.g., a hybridization assay, an amplification-based assay, e.g. qPCR assay, RT-PCR assay, or a mass spectrometry based assay. In certain other instances, the presence or level of LPAR5 is detected at the level of protein expression using, e.g., an immunoassay (e.g., ELISA), an immunohistochemical assay, or a mass spectrometry based assay. Suitable ELISA kits for determining the presence or level of LPAR5 in a serum, plasma, saliva, or urine sample are available from, e.g., Sigma-Aldrich (St. Louis, Mo.), Abcam (Cambridge, Mass.), and Novus Biologicals (Littleton, Colo.).

### 4. Coiled-Coil Domain Containing 144A (CCDC144A)

[0140] CCDC144A is a 165 kDa protein (NP_{—}055510 (SEQ ID NO:103)) encoded by the CCDC147 gene (Entrez GeneID: 9720; NM_{—}014695 (SEQ ID NO:28)). Little is known about the biology of CCDC144A. qRT-PCR validation studies of peripheral blood samples from 98 patients with IBS indicate that CCDC144A is highly predictive of IBS, and in particular of the IBS-D subtype (Example 4). In certain embodiments, CCDC144A and/or an mRNA encoding CCDC144A are useful biomarkers for IBS.

[0141] In certain instances, the presence or level of CCDC144A or a precursor thereof, is detected at the level of mRNA expression (e.g., via transformation) with an assay such as, e.g., a hybridization assay, an amplification-based assay, e.g. qPCR assay, RT-PCR assay, or a mass spectrometry based assay. In certain other instances, the presence or level of CCDC144A is detected at the level of protein expression using, e.g., an immunoassay (e.g., ELISA), an immunohistochemical assay, or a mass spectrometry based assay.

### 5. Guanine Nucleotide-Binding Protein G(I)/G(S)/G(O) Subunit Gamma-3 (GNG3)

[0142] GNG3 is a gamma subunit for a heterotrimeric G protein. GNG3 provides specificity for the interaction between the heterotrimeric G protein and the G protein receptor (GPR). GNG3 is encoded by the guanine nucleotide binding protein (G protein), gamma 3 gene (Entrez GeneID: 2785; NM_{—}012202 (SEQ ID NO:16)) and is produced after processing of the guanine nucleotide binding protein (G protein), gamma 3 precursor polypeptide (NP_{—}036334 (SEQ ID NO:91)). qRT-PCR validation studies of peripheral blood samples from 98 patients with IBS indicate that GNG3 is highly predictive of IBS, and in particular of the IBS-D subtype (Example 4). In certain embodiments, GNG3, a GNG3 precursor polypeptide, and/or an mRNA encoding GNG3 are useful biomarkers for IBS.

[0143] In certain instances, the presence or level of GNG3 is detected at the level of mRNA expression (e.g., via transformation) with an assay such as, e.g., a hybridization assay, an amplification-based assay, e.g. qPCR assay, RT-PCR assay, or a mass spectrometry based assay. In certain other instances, the presence or level of GNG3, or a precursor thereof, is detected at the level of protein expression using, e.g., an immunoassay (e.g., ELISA), an immunohistochemical assay, or a mass spectrometry based assay. Suitable ELISA kits for determining the presence or level of GNG3 in a serum, plasma, saliva, or urine sample are available from, e.g., Sigma-Aldrich (St. Louis, Mo.), Abcam (Cambridge, Mass.), and Novus Biologicals (Littleton, Colo.).

TABLE 1
Differentially expressed genes selected for validation via qRT-PCR.

| | | Gene | |
|---|---|---|---|
| Category/Gene group | Gene Name | Symbol | Assay ID |
| Transcription factor | forkhead box D3 | FOXD3 | Hs00255287_s1 |
| Molecular function unclassified | phosphatidylinositol 4-kinase type 2 | PI4K2A | Hs00218300_m1 |
| | alpha | | |
| Synthase and synthetase | acyl-CoA synthetase short-chain | ACSS2 | Hs00218766_m1 |
| | family member 2 | | |
| Signaling molecule | agouti signaling protein, nonagouti | ASIP | Hs00181770_m1 |
| | homolog (mouse) | | |
| G-protein coupled receptor | olfactory receptor, family 2, | OR2L8 | Hs02338632_g1 |
| | subfamily L, member 8 | | |
| G-protein coupled receptor | lysophosphatidic acid receptor 5 | LPAR5 | Hs01051307_m1 |
| Zinc finger transcription factor | jumonji, AT rich interactive domain | JARID1B | Hs00981910_m1 |
| | 1B | | |
| Kinase modulator | cyclin-dependent kinase inhibitor | CDKN1C | Hs00175938_m1 |
| | 1C (p57, Kip2) | | |
| Molecular function unclassified | coiled-coil domain containing 147 | CCDC147 | Hs01001247_m1 |
| G-protein select regulatory | guanine nucleotide binding protein | GNG3 | Hs00360009_g1 |
| molecule | (G protein), gamma 3 | | |
| Molecular function unclassified | Rho guanine nucleotide exchange | ARHGEF10 | Hs00744267_s1 |
| | factor (GEF) 10 | | |
| Carbohydrate transporter | chromosome 20 open reading frame | C20orf71 | Hs00420455_m1 |
| | 71 | | |
| Carbohydrate transporter | chromosome 20 open reading frame | C20orf114 | Hs01113243_m1 |
| | 114 | | |
| Molecular function unclassified | sushi domain containing 4 | SUSD4 | Hs00215864_m1 |
| Zinc finger transcription factor | zinc finger protein 33B | ZNF33B | Hs00300609_s1 |
| G-protein coupled receptor | olfactory receptor, family 10, | OR10W1 | Hs01398519_s1 |
| | subfamily W, member 1 | | |
| Molecular function unclassified | RCSD domain containing 1 | RCSD1 | Hs00364590_m1 |
| Transcription factor | coiled-coil domain containing 144 | CCDC144A | Hs00417617_m1 |
| | family | | |
| Molecular function unclassified | postmeiotic segregation increased 2- | PMS2L2 | Hs02379621_u1 |
| | like 2 pseudogene | | |
| Signaling molecule | attractin-like 1 | ATRNL1 | Hs00390459_m1 |
| Receptor/G-protein coupled | olfactory receptor, family 51, | OR51E1 | Hs00379183_m1 |
| receptor | subfamily E, member 1 | | |
| Signaling molecule/Peptide | islet amyloid polypeptide | IAPP | Hs00169095_m1 |
| hormone | | | |
| Molecular function unclassified | leucine rich repeat containing 18 | LRRC18 | Hs00736427_m1 |
| Molecular function unclassified | lysophosphatidylglycerol | SNORD77 | Hs00360353_m1 |
| | acyltransferase 1 | | |
| Molecular function unclassified | ring finger protein 26 | RNF26 | Hs00259249_s1 |
| Cell junction protein | gap junction protein, alpha 8, 50 kDa | GJA8 | Hs01102028_m1 |
| Extracellular matrix glycoprotein | glypican 2 | GPC2 | Hs00415099_m1 |
| Select regulatory molecule/ | angiotensinogen (serpin peptidase | AGT | Hs00174854_m1 |
| Protease inhibitor | inhibitor, clade A, member 8) | | |
| Select regulatory molecule/G- | dynamin 3 | DNM3 | Hs00399015_m1 |
| protein | | | |
| Molecular function unclassified | ribosomal RNA processing 7 | RRP7A | Hs00414229_m1 |
| | homolog A (S. cerevisiae) | | |
| Calmodulin related protein | ankyrin repeat domain 5 | ANKRD5 | Hs00223080_m1 |
| Receptor | glycoprotein A33 (transmembrane) | GPA33 | Hs00170690_m1 |
| Molecular function unclassified | RUN and SH3 domain containing 1 | RUSC1 | Hs00204904_m1 |
| Molecular function unclassified | cell division cycle 123 homolog (S. cerevisiae) | CDC123 | Hs00195709_m1 |
| Receptor/G-protein coupled | vasoactive intestinal peptide | VIPR1 | Hs00270351_m1 |
| receptor | receptor 1 | | |
| Transcription factor/Zinc finger | metastasis associated 1 family, | MTA2 | Hs00191018_m1 |
| transcription factor | member 2 | | |
| Molecular function unclassified | ring finger and CCCH-type zinc | RC3H1 | Hs02577215_m1 |
| | finger domains 1 | | |
| Molecular function unclassified | KIAA0090 | KIAA0090 | Hs01076375_m1 |
| Receptor/G-protein coupled | G protein-coupled receptor 87 | GPR87 | Hs00225057_m1 |
| receptor | | | |
| Molecular function unclassified | MAP6 domain containing 1 | MAP6D1 | Hs00227533_m1 |

[0144] B. Additional Diagnostic Markers

[0145] In certain embodiments, the methods of the present invention comprise determining an RNA IBS biomarker profile in combination with an additional protein or serological IBS biomarker. In some embodiments, the additional diagnostic marker profile is determined by detecting the presence or level of at least one, two, three, four, five, six, seven, eight, nine, ten, or more diagnostic markers selected from the group consisting of a cytokine (e.g., IL-8, IL-β, TWEAK, leptin, OPG, MIP-β, GROα, CXCL4/PF-4, and/or CXCL7/NAP-2), growth factor (e.g., EGF, VEGF, PEDF, BDNF, and/or SDGF), anti-neutrophil antibody (e.g., ANCA, pANCA, cANCA, NSNA, and/or SAPPA), ASCA (e.g., ASCA-IgA, ASCA-IgG, and/or ASCA-IgM), antimicrobial antibody (e.g., anti-OmpC antibody, anti-flagellin antibody, and/or anti-I2 antibody), mast cell marker (e.g., tryptase, histamine, and/or prostaglandin E2 (PGE2)), stress marker (e.g., Urocortin (Ucn), Corticotropin-releasing hormone-binding protein (CRFBP), Cortisol, and/or Adrenocorticotropic hormone (ACTH, corticotrophin)), gastrointestinal hormone (e.g., Calcitonin gene-related peptide (CGRP), Substance P, Nerve Growth Factor (NGF), Neurokinin A, Neurokinin B, Vasoactive Intestinal Peptide (VI P), Glucagon-Like Peptide 2 (GLP-2), Motilin, and/or Pituitary Adenylate Cyclase-Activating Peptide (PACAP)), serotonin metabolite (e.g., tryptophan, 5-HT-o-sulfate, serotonin O-sulfate (5-Hydroxytryptamine O-sulfate; 5-HT-o-sulfate), 5-Hydroxyindoleacetic acid (5-HIAA), 5-HT glucuronide (5-HT-GA), or 5-hydroxytrytophol (5-HTOL)), serotonin pathway marker (e.g., UDP-glucuronosyltransferase 1-6 (UGT1A6), serotonin reuptake transporter (SERT), Tryptophan hydroxylase 1 (TPH1), Monoamine oxidase A (MAO-A), Monoamine oxidase B (MAO-B), or Hydroxytryptamine (serotonin) receptor 3A (5-HT3A; 5-HT3R)), carbohydrate deficient transferrin (CDT), lactoferrin, an anti-tissue transglutaminase (tTG) antibody, lipocalin (e.g., NGAL, NGAL/MMP-9 complex), a matrix metalloproteinase (MMP; e.g., MMP-9), a complex of lipocalin and MMP, a tissue inhibitor of metalloproteinases (TIMPs; e.g., TIMP-1), a globulin (e.g., an alpha-globulin, alpha-2-macroglobulin, haptoglobin, and/or orosomucoid), an actin-severing protein (e.g., gelsolin), an 5100 protein (e.g., calgranulin), a fibrinopeptide (i.e., FIBA), calcitonin gene-related peptide (CGRP), a tachykinin (e.g., Substance P), ghrelin, neurotensin, corticotropin-releasing hormone (CRH), elastase, C-reactive protein (CRP), lactoferrin, an anti-lactoferrin antibody, calprotectin, hemoglobin, NOD2/CARD15, serotonin reuptake transporter (SERT), tryptophan hydroxylase-1,5-hydroxytryptamine (5-HT), lactulose, a serine protease (e.g., tryptase such as (β-tryptase), prostaglandin (e.g., PGE₂), histamine, and a combination thereof. In certain embodiments, the additional biomarker is selected from those found in Table 2. Other non-limiting examples of biomarkers suitable for use in the methods of the present invention include those found in US Patent Publication No. 2008/0085524, filed Aug. 14, 2007, U.S. Provisional Application Ser. No. 61/220,525, filed Jun. 25, 2009, and U.S. Provisional Application Ser. No. 61/256,717, filed Oct. 30, 2009. In one embodiment of the invention, the novel RNA IBS biomarkers of the invention may be combined with a diagnostic marker found in Table 2. One skilled in the art will also know of other diagnostic markers suitable for use in the present invention.

TABLE 2
Exemplary diagnostic markers suitable for use in IBS diagnosis,
prognosis, and classification.

| Family | Biomarker |
|---|---|
| Cytokines | CXCL8/IL-8 |
| | IL-1β |
| | TNF-related weak inducer of apoptosis (TWEAK) |
| | Leptin |
| | Osteoprotegerin (OPG) |
| | CCL19/MIP-3β |
| | CXCL1/GRO1/GROα |
| | CXCL4/PF-4 |
| | CXCL7/NAP-2 |
| | INFβ2/IL-6 |
| | IL-12 |
| | CSIF/IL-10 |
| | Tumor necrosis factor-alpha (TNF-α) |
| Growth Factors | Epidermal growth factor (EGF) |
| | Vascular endothelial growth factor (VEGF) |
| | Pigment epithelium-derived factor (PEDF) |
| | Brain-derived neurotrophic factor (BDNF) |
| | Schwannoma-derived growth factor |
| | (SDGF)/amphiregulin |
| Anti-neutrophil | Anti-neutrophil cytoplasmic antibody (ANCA) |
| antibodies | Perinuclear anti-neutrophil cytoplasmic antibody |
| | (pANCA) |
| | Anti-I2 antibody |
| ASCAs | ASCA-IgA |
| | ASCA-IgG |
| Antimicrobial | Anti-outer membrane protein C (OmpC) antibody |
| antibodies | Anti-Cbir-1 flagellin antibody |
| Lipocalin | Neutrophil gelatinase-associated lipocalin (NGAL) |
| MMP | MMP-9 |
| TIMP | TIMP-1 |
| Alpha-globulins | Alpha-2-macroglobulin (α-MG) |
| | Haptoglobin precursor alpha-2 (Hpα2) |
| | Orosomucoid |
| Actin-severing | Gelsolin |
| protein | |
| S100 protein | Calgranulin A/S100A8/MRP-8 |
| Fibrinopeptide | Fibrinopeptide A (FIBA) |
| Others | Lactoferrin |
| | Anti-tissue transglutaminase (tTG) antibody |
| | Carbohydrate Deficient Transferrin (CDT) |
| Stress Markers | Urocortin (Ucn) |
| | Corticotropin-releasing hormone-binding protein |
| | (CRFBP) |
| | Cortisol |
| | Adrenocorticotropic hormone (ACTH, corticotrophin) |
| Mast Cell | Tryptase |
| Markers | Histamine |
| | Prostaglandin E2 (PGE2) |
| Gastrointestinal | Calcitonin gene-related peptide (CGRP) |
| hormones | Substance P |
| | Nerve Growth Factor (NGF) |
| | Neurokinin A |
| | Neurokinin B |
| | Vasoactive Intestinal Peptide (VIP) |
| | Glucagon-Like Peptide 2 (GLP-2) |
| | Motilin |
| | Pituitary Adenylate Cyclase-Activating Peptide |
| | (PACAP) |
| Serotonin | Serotonin |
| Metabolites | Tryptophan |
| | Serotonin O-sulfate (5-Hydroxytryptamine O-sulfate; |
| | 5-HT-o-sulfate) |
| | 5-Hydroxyindoleacetic acid (5-HIAA) |
| | 5-HT glucuronide (5-HT-GA) |
| Serotonin | UDP-glucuronosyltransferase 1-6 (UGT1A6) |
| Pathway | serotonin reuptake transporter (SERT) |
| Markers | Tryptophan hydroxylase 1 (TPH1) |
| | Monoamine oxidase A (MAO-A) |
| | Monoamine oxidase B (MAO-B) |
| | Hydroxytryptamine (serotonin) receptor 3A (5-HT3A; |
| | 5-HT3R) |

[0146] C. Classification Markers

[0147] A variety of classification markers are suitable for use in the methods, systems, and code of the present invention for classifying IBS into a category, form, or clinical subtype such as, for example, IBS-constipation (IBS-C), IBS-diarrhea (IBS-D), IBS-mixed (IBS-M), IBS-alternating (IBS-A), or post-infectious IBS (IBS-PI). Examples of classification markers include, without limitation, any of the diagnostic mRNA markers described above, as well as e.g., leptin, serotonin reuptake transporter (SERT), tryptophan hydroxylase-1, 5-hydroxytryptamine (5-HT), tryptase, PGE₂, histamine, mucosal protein 8, keratin-8, claudin-8, zonulin, corticotropin-releasing hormone receptor-1 (CRHR1), corticotropin-releasing hormone receptor-2 (CRHR2), and the like.

[0148] For instance, Examples 1 and 2 from U.S. Provisional Application Ser. No. 61/220,525, filed Jun. 25, 2009, which is herein incorporated by reference in its entirety for all purposes, illustrate that measuring α-tryptase levels is particularly useful for distinguishing IBS-C patient samples from IBS-A and IBS-D patient samples. Similarly, Example 1 from US Patent Publication No. 2008/0085524, filed Aug. 14, 2007, which is herein incorporated by reference in its entirety for all purposes, illustrates that measuring leptin levels is particularly useful for distinguishing IBS-C patient samples from IBS-A and IBS-D patient samples. In addition, mucosal SERT and tryptophan hydroxylase-1 expression have been shown to be decreased in IBS-C and IBS-D (see, e.g., Gershon, J. Clin. Gastroenterol., 39 (5 Suppl): 5184-193 (2005)). Furthermore, IBS-C patients show impaired postprandial 5-HT release, whereas IBS-PI patients have higher peak levels of 5-HT (see, e.g., Dunlop, Clin Gastroenterol Hepatol., 3:349-357 (2005)).

### V. Assays

[0149] Any of a variety of assays, techniques, and kits known in the art can be used to determine the presence or level of one or more markers in a sample to classify whether the sample is associated with IBS.

[0150] The present invention relies, in part, on determining the presence or level of at least one marker in a sample obtained from an individual. As used herein, the term “determining the presence of at least one marker” includes determining the presence of each marker of interest by using any quantitative or qualitative assay known to one of skill in the art. In certain instances, qualitative assays that determine the presence or absence of a particular trait, variable, or biochemical or serological substance (e.g., RNA, mRNA, miRNA, protein, or antibody) are suitable for detecting each marker of interest. In certain other instances, quantitative assays that determine the presence or absence of RNA, protein, antibody, or activity are suitable for detecting each marker of interest. As used herein, the term “determining the level of at least one marker” includes determining the level of each marker of interest by using any direct or indirect quantitative assay known to one of skill in the art. In certain instances, quantitative assays that determine, for example, the relative or absolute amount of RNA, mRNA, miRNA, protein, antibody, or activity are suitable for determining the level of each marker of interest. One skilled in the art will appreciate that any assay useful for determining the level of a marker is also useful for determining the presence or absence of the marker.

[0151] Analysis of marker mRNA levels using routine techniques such as Northern analysis, reverse-transcriptase polymerase chain reaction (e.g., qRT-PCR, RT-PCR), microarray analysis, Luminex MultiAnalyte Profiling (xMAP) technology or any other methods based on hybridization to a nucleic acid sequence that is complementary to a portion of the marker coding sequence (e.g., slot blot hybridization) are within the scope of the present invention. Applicable PCR amplification techniques are described in, e.g., Ausubel et al., Current Protocols in Molecular Biology, John Wiley & Sons, Inc. New York (1999), Chapter 7 and Supplement 47; Theophilus et al., “PCR Mutation Detection Protocols,” Humana Press, (2002); and Innis et al., PCR Protocols, San Diego, Academic Press, Inc. (1990). General nucleic acid hybridization methods are described in Anderson, “Nucleic Acid Hybridization,” BIOS Scientific Publishers, 1999. Amplification or hybridization of a plurality of transcribed nucleic acid sequences (e.g., mRNA or cDNA) can also be performed from mRNA or cDNA sequences arranged in a microarray. Microarray methods are generally described in Hardiman, “Microarrays Methods and Applications: Nuts & Bolts,” DNA Press, 2003; and Baldi et al., “DNA Microarrays and Gene Expression: From Experiments to Data Analysis and Modeling,” Cambridge University Press, 2002.

[0152] Analysis of the genotype of a marker such as a genetic marker can be performed using techniques known in the art including, without limitation, polymerase chain reaction (PCR)-based analysis, sequence analysis, and electrophoretic analysis. A non-limiting example of a PCR-based analysis includes a Taqman® allelic discrimination assay available from Applied Biosystems. Non-limiting examples of sequence analysis include Maxam-Gilbert sequencing, Sanger sequencing, capillary array DNA sequencing, thermal cycle sequencing (Sears et al., Biotechniques, 13:626-633 (1992)), solid-phase sequencing (Zimmerman et al., Methods Mol. Cell Biol., 3:39-42 (1992)), sequencing with mass spectrometry such as matrix-assisted laser desorption/ionization time-of-flight mass spectrometry (MALDI-TOF/MS; Fu et al., Nature Biotech., 16:381-384 (1998)), and sequencing by hybridization (Chee et al., Science, 274:610-614 (1996); Drmanac et al., Science, 260:1649-1652 (1993); Drmanac et al., Nature Biotech., 16:54-58 (1998)). Non-limiting examples of electrophoretic analysis include slab gel electrophoresis such as agarose or polyacrylamide gel electrophoresis, capillary electrophoresis, and denaturing gradient gel electrophoresis. Other methods for genotyping an individual at a polymorphic site in a marker include, e.g., the INVADER® assay from Third Wave Technologies, Inc., restriction fragment length polymorphism (RFLP) analysis, allele-specific oligonucleotide hybridization, a heteroduplex mobility assay, and single strand conformational polymorphism (SSCP) analysis.

[0153] As used herein, the term “antibody” includes a population of immunoglobulin molecules, which can be polyclonal or monoclonal and of any isotype, or an immunologically active fragment of an immunoglobulin molecule. Such an immunologically active fragment contains the heavy and light chain variable regions, which make up the portion of the antibody molecule that specifically binds an antigen. For example, an immunologically active fragment of an immunoglobulin molecule known in the art as Fab, Fab′ or F(ab′)₂ is included within the meaning of the term antibody.

[0154] Flow cytometry can be used to determine the presence or level of one or more markers in a sample. Such flow cytometric assays, including bead based immunoassays, can be used to determine, e.g., antibody marker levels in the same manner as described for detecting serum antibodies to Candida albicans and HIV proteins (see, e.g., Bishop and Davis, J. Immunol. Methods, 210:79-87 (1997); McHugh et al., J. Immunol. Methods, 116:213 (1989); Scillian et al., Blood, 73:2041 (1989)).

[0155] Phage display technology for expressing a recombinant antigen specific for a marker can also be used to determine the presence or level of one or more markers in a sample. Phage particles expressing an antigen specific for, e.g., an antibody marker can be anchored, if desired, to a multi-well plate using an antibody such as an anti-phage monoclonal antibody (Felici et al., “Phage-Displayed Peptides as Tools for Characterization of Human Sera” in Abelson (Ed.), Methods in Enzymol., 267, San Diego: Academic Press, Inc. (1996)).

[0156] A variety of immunoassay techniques, including competitive and non-competitive immunoassays, can be used to determine the presence or level of one or more markers in a sample (see, e.g., Self and Cook, Curr. Opin. Biotechnol., 7:60-65 (1996)). The term immunoassay encompasses techniques including, without limitation, enzyme immunoassays (EIA) such as enzyme multiplied immunoassay technique (EMIT), enzyme-linked immunosorbent assay (ELISA), antigen capture ELISA, sandwich ELISA, IgM antibody capture ELISA (MAC ELISA), and microparticle enzyme immunoassay (MEIA); capillary electrophoresis immunoassays (CEIA); radioimmunoassays (RIA); immunoradiometric assays (IRMA); fluorescence polarization immunoassays (FPIA); and chemiluminescence assays (CL). If desired, such immunoassays can be automated. Immunoassays can also be used in conjunction with laser induced fluorescence (see, e.g., Schmalzing and Nashabeh, Electrophoresis, 18:2184-2193 (1997); Bao, J. Chromatogr. B. Biomed. Sci., 699:463-480 (1997)). Liposome immunoassays, such as flow-injection liposome immunoassays and liposome immunosensors, are also suitable for use in the present invention (see, e.g., Rongen et al., J. Immunol. Methods, 204:105-133 (1997)). In addition, nephelometry assays, in which the formation of protein/antibody complexes results in increased light scatter that is converted to a peak rate signal as a function of the marker concentration, are suitable for use in the present invention. Nephelometry assays are commercially available from Beckman Coulter (Brea, Calif.; Kit #449430) and can be performed using a Behring Nephelometer Analyzer (Fink et al., J. Clin. Chem. Clin. Biol. Chem., 27:261-276 (1989)).

[0157] Antigen capture ELISA can be useful for determining the presence or level of one or more markers in a sample. For example, in an antigen capture ELISA, an antibody directed to a marker of interest is bound to a solid phase and sample is added such that the marker is bound by the antibody. After unbound proteins are removed by washing, the amount of bound marker can be quantitated using, e.g., a radioimmunoassay (see, e.g., Harlow and Lane, Antibodies: A Laboratory Manual, Cold Spring Harbor Laboratory, New York, 1988)). Sandwich ELISA can also be suitable for use in the present invention. For example, in a two-antibody sandwich assay, a first antibody is bound to a solid support, and the marker of interest is allowed to bind to the first antibody. The amount of the marker is quantitated by measuring the amount of a second antibody that binds the marker. The antibodies can be immobilized onto a variety of solid supports, such as magnetic or chromatographic matrix particles, the surface of an assay plate (e.g., microtiter wells), pieces of a solid substrate material or membrane (e.g., plastic, nylon, paper), and the like. An assay strip can be prepared by coating the antibody or a plurality of antibodies in an array on a solid support. This strip can then be dipped into the test sample and processed quickly through washes and detection steps to generate a measurable signal, such as a colored spot.

[0158] A radioimmunoassay using, for example, an iodine-125 (¹²⁵ I) labeled secondary antibody (Harlow and Lane, supra) is also suitable for determining the presence or level of one or more markers in a sample. A secondary antibody labeled with a chemiluminescent marker can also be suitable for use in the present invention. A chemiluminescence assay using a chemiluminescent secondary antibody is suitable for sensitive, non-radioactive detection of marker levels. Such secondary antibodies can be obtained commercially from various sources, e.g., Amersham Lifesciences, Inc. (Arlington Heights, Ill.).

[0159] The immunoassays described above are particularly useful for determining the presence or level of one or more markers in a sample. As a non-limiting example, an ELISA using an IL-8-binding molecule such as an anti-IL-8 antibody or an extracellular IL-8-binding protein (e.g., IL-8 receptor) is useful for determining whether a sample is positive for IL-8 protein or for determining IL-8 protein levels in a sample. A fixed neutrophil ELISA is useful for determining whether a sample is positive for ANCA or for determining ANCA levels in a sample. Similarly, an ELISA using yeast cell wall phosphopeptidomannan is useful for determining whether a sample is positive for ASCA-IgA and/or ASCA-IgG, or for determining ASCA-IgA and/or ASCA-IgG levels in a sample. An ELISA using OmpC protein or a fragment thereof is useful for determining whether a sample is positive for anti-OmpC antibodies, or for determining anti-OmpC antibody levels in a sample. An ELISA using I2 protein or a fragment thereof is useful for determining whether a sample is positive for anti-I2 antibodies, or for determining anti-I2 antibody levels in a sample. An ELISA using flagellin protein (e.g., Cbir-1 flagellin) or a fragment thereof is useful for determining whether a sample is positive for anti-flagellin antibodies, or for determining anti-flagellin antibody levels in a sample. In addition, the immunoassays described above are particularly useful for determining the presence or level of other diagnostic markers in a sample.

[0160] Specific immunological binding of the antibody to the marker of interest can be detected directly or indirectly. Direct labels include fluorescent or luminescent tags, metals, dyes, radionuclides, and the like, attached to the antibody. An antibody labeled with iodine-125 (¹²⁵I) can be used for determining the levels of one or more markers in a sample. A chemiluminescence assay using a chemiluminescent antibody specific for the marker is suitable for sensitive, non-radioactive detection of marker levels. An antibody labeled with fluorochrome is also suitable for determining the levels of one or more markers in a sample. Examples of fluorochromes include, without limitation, DAPI, fluorescein, Hoechst 33258, R-phycocyanin, B-phycoerythrin, R-phycoerythrin, rhodamine, Texas red, and lissamine. Secondary antibodies linked to fluorochromes can be obtained commercially, e.g., goat F(ab′)₂ anti-human IgG-FITC is available from Tago Immunologicals (Burlingame, Calif.).

[0161] Indirect labels include various enzymes well-known in the art, such as horseradish peroxidase (HRP), alkaline phosphatase (AP), β-galactosidase, urease, and the like. A horseradish-peroxidase detection system can be used, for example, with the chromogenic substrate tetramethylbenzidine (TMB), which yields a soluble product in the presence of hydrogen peroxide that is detectable at 450 nm. An alkaline phosphatase detection system can be used with the chromogenic substrate p-nitrophenyl phosphate, for example, which yields a soluble product readily detectable at 405 nm. Similarly, a β-galactosidase detection system can be used with the chromogenic substrate o-nitrophenyl-β-D-galactopyranoside (ONPG), which yields a soluble product detectable at 410 nm. An urease detection system can be used with a substrate such as urea-bromocresol purple (Sigma Immunochemicals; St. Louis, Mo.). A useful secondary antibody linked to an enzyme can be obtained from a number of commercial sources, e.g., goat F(ab′)₂ anti-human IgG-alkaline phosphatase can be purchased from Jackson ImmunoResearch (West Grove, Pa.).

[0162] A signal from the direct or indirect label can be analyzed, for example, using a spectrophotometer to detect color from a chromogenic substrate; a radiation counter to detect radiation such as a gamma counter for detection of ¹²⁵I; or a fluorometer to detect fluorescence in the presence of light of a certain wavelength. For detection of enzyme-linked antibodies, a quantitative analysis of the amount of marker levels can be made using a spectrophotometer such as an EMAX Microplate Reader (Molecular Devices; Menlo Park, Calif.) in accordance with the manufacturer's instructions. If desired, the assays of the present invention can be automated or performed robotically, and the signal from multiple samples can be detected simultaneously.

[0163] Quantitative western blotting can also be used to detect or determine the presence or level of one or more markers in a sample. Western blots can be quantitated by well-known methods such as scanning densitometry or phosphorimaging. As a non-limiting example, protein samples are electrophoresed on 10% SDS-PAGE Laemmli gels. Primary murine monoclonal antibodies are reacted with the blot, and antibody binding can be confirmed to be linear using a preliminary slot blot experiment. Goat anti-mouse horseradish peroxidase-coupled antibodies (BioRad) are used as the secondary antibody, and signal detection performed using chemiluminescence, for example, with the Renaissance chemiluminescence kit (New England Nuclear; Boston, Mass.) according to the manufacturer's instructions. Autoradiographs of the blots are analyzed using a scanning densitometer (Molecular Dynamics; Sunnyvale, Calif.) and normalized to a positive control. Values are reported, for example, as a ratio between the actual value to the positive control (densitometric index). Such methods are well known in the art as described, for example, in Parra et al., J. Vasc. Surg., 28:669-675 (1998).

[0164] Alternatively, a variety of immunohistochemical assay techniques can be used to determine the presence or level of one or more markers in a sample. The term immunohistochemical assay encompasses techniques that utilize the visual detection of fluorescent dyes or enzymes coupled (i.e., conjugated) to antibodies that react with the marker of interest using fluorescent microscopy or light microscopy and includes, without limitation, direct fluorescent antibody assay, indirect fluorescent antibody (IFA) assay, anticomplement immunofluorescence, avidin-biotin immunofluorescence, and immunoperoxidase assays. An IFA assay, for example, is useful for determining whether a sample is positive for ANCA, the level of ANCA in a sample, whether a sample is positive for pANCA, the level of pANCA in a sample, and/or an ANCA staining pattern (e.g., cANCA, pANCA, NSNA, and/or SAPPA staining pattern). The concentration of ANCA in a sample can be quantitated, e.g., through endpoint titration or through measuring the visual intensity of fluorescence compared to a known reference standard.

[0165] Alternatively, the presence or level of a marker of interest can be determined by detecting or quantifying the amount of the purified marker. Purification of the marker can be achieved, for example, by high pressure liquid chromatography (HPLC), alone or in combination with mass spectrometry (e.g., MALDI/MS, MALDI-TOF/MS, SELDI-TOF/MS, tandem MS, etc.). Qualitative or quantitative detection of a marker of interest can also be determined by well-known methods including, without limitation, Bradford assays, Coomassie blue staining, silver staining, assays for radiolabeled protein, and mass spectrometry.

[0166] The analysis of a plurality of markers may be carried out separately or simultaneously with one test sample. For separate or sequential assay of markers, suitable apparatuses include clinical laboratory analyzers such as the ElecSys (Roche), the AxSym (Abbott), the Access (Beckman), the ADVIA®, the CENTAUR® (Bayer), and the NICHOLS ADVANTAGE® (Nichols Institute) immunoassay systems. Preferred apparatuses or protein chips perform simultaneous assays of a plurality of markers on a single surface. Particularly useful physical formats comprise surfaces having a plurality of discrete, addressable locations for the detection of a plurality of different markers. Such formats include protein microarrays, or “protein chips” (see, e.g., Ng et al., J Cell Mol. Med., 6:329-340 (2002)) and certain capillary devices (see, e.g., U.S. Pat. No. 6,019,944). In these embodiments, each discrete surface location may comprise antibodies to immobilize one or more markers for detection at each location. Surfaces may alternatively comprise one or more discrete particles (e.g., microparticles or nanoparticles) immobilized at discrete locations of a surface, where the microparticles comprise antibodies to immobilize one or more markers for detection. Yet another suitable format for performing simultaneous assays of a plurality of markers is the Luminex MultiAnalyte Profiling (xMAP) technology, previously known as FlowMetrix and LabMAP (Elshal and McCoy, 2006). This is a multiplex bead-based flow cytometric assay that utilizes polystyrene beads that are internally dyed with different intensities of red and infrared fluorophores. The beads can be bound by various capture reagents such as antibodies, oligonucleotides, and peptides, therefore facilitating the quantification of various RNA, mRNA, miRNA, proteins, ligands, and DNA (Fulton et al, 1997; Kingsmore, 2006; Nolan and Mandy, 2006, Vignali, 2000; Ray et al, 2005).

[0167] Several markers of interest may be combined into one test for efficient processing of a multiple of samples. In addition, one skilled in the art would recognize the value of testing multiple samples (e.g., at successive time points, etc.) from the same subject. Such testing of serial samples can allow the identification of changes in marker levels over time. Increases or decreases in marker levels, as well as the absence of change in marker levels, can also provide useful information to classify IBS or to rule out diseases and disorders associated with IBS-like symptoms.

[0168] A panel for measuring one or more of the markers described above may be constructed to provide relevant information related to the approach of the present invention for classifying a sample as being associated with IBS. Such a panel may be constructed to determine the presence or level of 1, 2, 3, 4, 5, 6, 7, 8, 9, 10, 11, 12, 13, 14, 15, 16, 17, 18, 19, 20, 25, 30, 35, 40, 45, 50, 55, 60, 65, 70, 75, 80, 85, 90, 95, 100 or more individual markers. The analysis of a single marker or subsets of markers can also be carried out by one skilled in the art in various clinical settings. These include, but are not limited to, ambulatory, urgent care, critical care, intensive care, monitoring unit, inpatient, outpatient, physician office, medical clinic, and health screening settings.

[0169] The analysis of markers could be carried out in a variety of physical formats as well. For example, the use of microtiter plates or automation could be used to facilitate the processing of large numbers of test samples. Alternatively, single sample formats could be developed to facilitate treatment and diagnosis in a timely fashion.

### VI. Statistical Algorithms

[0170] In some aspects, the present invention provides methods, systems, and code for classifying whether a sample is associated with IBS using a statistical algorithm or process to classify the sample as an IBS sample or non-IBS sample. In other aspects, the present invention provides methods, systems, and code for classifying whether a sample is associated with IBS using a first statistical algorithm or process to classify the sample as a non-IBD sample or IBD sample (i.e., IBD rule-out step), followed by a second statistical algorithm or process to classify the non-IBD sample as an IBS sample or non-IBS sample (i.e., IBS rule-in step). Preferably, the statistical algorithms or processes independently comprise one or more learning statistical classifier systems. As described herein, a combination of learning statistical classifier systems advantageously provides improved sensitivity, specificity, negative predictive value, positive predictive value, and/or overall accuracy for classifying whether a sample is associated with IBS.

[0171] The term “statistical algorithm” or “statistical process” includes any of a variety of statistical analyses used to determine relationships between variables. In the present invention, the variables are the presence or level of at least one marker of interest and/or the presence or severity of at least one IBS-related symptom. Any number of markers and/or symptoms can be analyzed using a statistical algorithm described herein. For example, 1, 2, 3, 4, 5, 6, 7, 8, 9, 10, 11, 12, 13, 14, 15, 16, 17, 18, 19, 20, 25, 30, 35, 40, 45, 50, 55, 60, 65, 70, 75, 80, 85, 90, 95, 100 or more biomarkers and/or symptoms can be included in a statistical algorithm. In one embodiment, logistic regression is used. In another embodiment, linear regression is used. In certain instances, the statistical algorithms of the present invention can use a quantile measurement of a particular marker within a given population as a variable. Quantiles are a set of “cut points” that divide a sample of data into groups containing (as far as possible) equal numbers of observations. For example, quartiles are values that divide a sample of data into four groups containing (as far as possible) equal numbers of observations. The lower quartile is the data value a quarter way up through the ordered data set; the upper quartile is the data value a quarter way down through the ordered data set. Quintiles are values that divide a sample of data into five groups containing (as far as possible) equal numbers of observations. The present invention can also include the use of percentile ranges of marker levels (e.g., tertiles, quartile, quintiles, etc.), or their cumulative indices (e.g., quartile sums of marker levels, etc.) as variables in the algorithms (just as with continuous variables).

[0172] Preferably, the statistical algorithms of the present invention comprise one or more learning statistical classifier systems. As used herein, the term “learning statistical classifier system” includes a machine learning algorithmic technique capable of adapting to complex data sets (e.g., panel of markers of interest and/or list of IBS-related symptoms) and making decisions based upon such data sets. In some embodiments, a single learning statistical classifier system such as a classification tree (e.g., random forest) is used. In other embodiments, a combination of 2, 3, 4, 5, 6, 7, 8, 9, 10, or more learning statistical classifier systems are used, preferably in tandem. Examples of learning statistical classifier systems include, but are not limited to, those using inductive learning (e.g., decision/classification trees such as random forests, classification and regression trees (C&RT), boosted trees, etc.), Probably Approximately Correct (PAC) learning, connectionist learning (e.g., neural networks (NN), artificial neural networks (ANN), neuro fuzzy networks (NFN), network structures, perceptrons such as multi-layer perceptrons, multi-layer feed-forward networks, applications of neural networks, Bayesian learning in belief networks, etc.), reinforcement learning (e.g., passive learning in a known environment such as naïve learning, adaptive dynamic learning, and temporal difference learning, passive learning in an unknown environment, active learning in an unknown environment, learning action-value functions, applications of reinforcement learning, etc.), and genetic algorithms and evolutionary programming. Other learning statistical classifier systems include support vector machines (e.g., Kernel methods), multivariate adaptive regression splines (MARS), Levenberg-Marquardt algorithms, Gauss-Newton algorithms, mixtures of Gaussians, gradient descent algorithms, and learning vector quantization (LVQ).

[0173] Random forests are learning statistical classifier systems that are constructed using an algorithm developed by Leo Breiman and Adele Cutler. Random forests use a large number of individual decision trees and decide the class by choosing the mode (i.e., most frequently occurring) of the classes as determined by the individual trees. Random forest analysis can be performed, e.g., using the RandomForests software available from Salford Systems (San Diego, Calif.). See, e.g., Breiman, Machine Learning, 45:5-32 (2001); and http://stat-www.berkeley.edu/users/breiman/RandomForests/cc_home.htm, for a description of random forests.

[0174] Classification and regression trees represent a computer intensive alternative to fitting classical regression models and are typically used to determine the best possible model for a categorical or continuous response of interest based upon one or more predictors. Classification and regression tree analysis can be performed, e.g., using the CART software available from Salford Systems or the Statistical data analysis software available from StatSoft, Inc. (Tulsa, Okla.). A description of classification and regression trees is found, e.g., in Breiman et al. “Classification and Regression Trees,” Chapman and Hall, New York (1984); and Steinberg et al., “CART: Tree-Structured Non-Parametric Data Analysis,” Salford Systems, San Diego, (1995).

[0175] Neural networks are interconnected groups of artificial neurons that use a mathematical or computational model for information processing based on a connectionist approach to computation. Typically, neural networks are adaptive systems that change their structure based on external or internal information that flows through the network. Specific examples of neural networks include feed-forward neural networks such as perceptrons, single-layer perceptrons, multi-layer perceptrons, backpropagation networks, ADALINE networks, MADALINE networks, Learnmatrix networks, radial basis function (RBF) networks, and self-organizing maps or Kohonen self-organizing networks; recurrent neural networks such as simple recurrent networks and Hopfield networks; stochastic neural networks such as Boltzmann machines; modular neural networks such as committee of machines and associative neural networks; and other types of networks such as instantaneously trained neural networks, spiking neural networks, dynamic neural networks, and cascading neural networks. Neural network analysis can be performed, e.g., using the Statistical data analysis software available from StatSoft, Inc. See, e.g., Freeman et al., In “Neural Networks: Algorithms, Applications and Programming Techniques,” Addison-Wesley Publishing Company (1991); Zadeh, Information and Control, 8:338-353 (1965); Zadeh, “IEEE Trans. on Systems, Man and Cybernetics,” 3:28-44 (1973); Gersho et al., In “Vector Quantization and Signal Compression,” Kluywer Academic Publishers, Boston, Dordrecht, London (1992); and Hassoun, “Fundamentals of Artificial Neural Networks,” MIT Press, Cambridge, Mass., London (1995), for a description of neural networks.

[0176] Support vector machines are a set of related supervised learning techniques used for classification and regression and are described, e.g., in Cristianini et al., “An Introduction to Support Vector Machines and Other Kernel-Based Learning Methods,” Cambridge University Press (2000). Support vector machine analysis can be performed, e.g., using the SVM^{light} software developed by Thorsten Joachims (Cornell University) or using the LIBSVM software developed by Chih-Chung Chang and Chih-Jen Lin (National Taiwan University).

[0177] The learning statistical classifier systems described herein can be trained and tested using a cohort of samples (e.g., serological samples) from healthy individuals, IBS patients, IBD patients, and/or Celiac disease patients. For example, samples from patients diagnosed by a physician, and preferably by a gastroenterologist as having IBD using a biopsy, colonoscopy, or an immunoassay as described in, e.g., U.S. Pat. No. 6,218,129, are suitable for use in training and testing the learning statistical classifier systems of the present invention. Samples from patients diagnosed with IBD can also be stratified into Crohn's disease or ulcerative colitis using an immunoassay as described in, e.g., U.S. Pat. Nos. 5,750,355 and 5,830,675. Samples from patients diagnosed with IBS can be stratified into IBS-constipation (IBS-C), IBS-diarrhea (IBS-D), IBS-mixed (IBS-M), IBS-alternating (IBS-A), or post-infectious IBS (IBS-PI). Samples from patients diagnosed with IBS using a published criteria such as the Manning, Rome I, Rome II, or Rome III diagnostic criteria are suitable for use in training and testing the learning statistical classifier systems of the present invention. Samples from healthy individuals can include those that were not identified as IBD and/or IBS samples. One skilled in the art will know of additional techniques and diagnostic criteria for obtaining a cohort of patient samples that can be used in training and testing the learning statistical classifier systems of the present invention.

[0178] As used herein, the term “sensitivity” refers to the probability that a diagnostic method, system, or code of the present invention gives a positive result when the sample is positive, e.g., having IBS. Sensitivity is calculated as the number of true positive results divided by the sum of the true positives and false negatives. Sensitivity essentially is a measure of how well a method, system, or code of the present invention correctly identifies those with IBS from those without the disease. The statistical algorithms can be selected such that the sensitivity of classifying IBS is at least about 60%, and can be, for example, at least about 65%, 70%, 75%, 76%, 77%, 78%, 79%, 80%, 81%, 82%, 83%, 84%, 85%, 86%, 87%, 88%, 89%, 90%, 91%, 92%, 93%, 94%, 95%, 96%, 97%, 98%, or 99%. In preferred embodiments, the sensitivity of classifying IBS is at least about 90% when a combination of learning statistical classifier systems is used (see, Example 10 from US Patent Publication No. 2008/0085524, which is incorporated herein by reference in its entirety for all purposes) or at least about 85% when a single learning statistical classifier system is used (see, Example 11 from US Patent Publication No. 2008/0085524, which is incorporated herein by reference in its entirety for all purposes).

[0179] The term “specificity” refers to the probability that a diagnostic method, system, or code of the present invention gives a negative result when the sample is not positive, e.g., not having IBS. Specificity is calculated as the number of true negative results divided by the sum of the true negatives and false positives. Specificity essentially is a measure of how well a method, system, or code of the present invention excludes those who do not have IBS from those who have the disease. The statistical algorithms can be selected such that the specificity of classifying IBS is at least about 70%, for example, at least about 75%, 80%, 85%, 86%, 87%, 88%, 89%, 90%, 91%, 92%, 93%, 94%, 95%, 96%, 97%, 98%, or 99%. In preferred embodiments, the specificity of classifying IBS is at least about 86% when a combination of learning statistical classifier systems is used (see, Example 10 from US Patent Publication No. 2008/0085524, which is incorporated herein by reference in its entirety for all purposes) or at least about 84% when a single learning statistical classifier system is used (see, Example 11 from US Patent Publication No. 2008/0085524, which is incorporated herein by reference in its entirety for all purposes).

[0180] As used herein, the term “negative predictive value” or “NPV” refers to the probability that an individual identified as not having IBS actually does not have the disease. Negative predictive value can be calculated as the number of true negatives divided by the sum of the true negatives and false negatives. Negative predictive value is determined by the characteristics of the diagnostic method, system, or code as well as the prevalence of the disease in the population analyzed. The statistical algorithms can be selected such that the negative predictive value in a population having a disease prevalence is in the range of about 70% to about 99% and can be, for example, at least about 70%, 75%, 76%, 77%, 78%, 79%, 80%, 81%, 82%, 83%, 84%, 85%, 86%, 87%, 88%, 89%, 90%, 91%, 92%, 93%, 94%, 95%, 96%, 97%, 98%, or 99%. In preferred embodiments, the negative predictive value of classifying IBS is at least about 87% when a combination of learning statistical classifier systems is used (see, Example 10 from US Patent Publication No. 2008/0085524, which is incorporated herein by reference in its entirety for all purposes).

[0181] The term “positive predictive value” or “PPV” refers to the probability that an individual identified as having IBS actually has the disease. Positive predictive value can be calculated as the number of true positives divided by the sum of the true positives and false positives. Positive predictive value is determined by the characteristics of the diagnostic method, system, or code as well as the prevalence of the disease in the population analyzed. The statistical algorithms can be selected such that the positive predictive value in a population having a disease prevalence is in the range of about 80% to about 99% and can be, for example, at least about 80%, 85%, 86%, 87%, 88%, 89%, 90%, 91%, 92%, 93%, 94%, 95%, 96%, 97%, 98%, or 99%. In preferred embodiments, the positive predictive value of classifying IBS is at least about 90% when a combination of learning statistical classifier systems is used (see, Example 10 from US Patent Publication No. 2008/0085524, which is incorporated herein by reference in its entirety for all purposes).

[0182] Predictive values, including negative and positive predictive values, are influenced by the prevalence of the disease in the population analyzed. In the methods, systems, and code of the present invention, the statistical algorithms can be selected to produce a desired clinical parameter for a clinical population with a particular IBS prevalence. For example, learning statistical classifier systems can be selected for an IBS prevalence of up to about 1%, 2%, 3%, 4%, 5%, 6%, 7%, 8%, 9%, 10%, 15%, 20%, 25%, 30%, 35%, 40%, 45%, 50%, 55%, 60%, 65%, or 70%, which can be seen, e.g., in a clinician's office such as a gastroenterologist's office or a general practitioner's office.

[0183] As used herein, the term “overall agreement” or “overall accuracy” refers to the accuracy with which a method, system, or code of the present invention classifies a disease state. Overall accuracy is calculated as the sum of the true positives and true negatives divided by the total number of sample results and is affected by the prevalence of the disease in the population analyzed. For example, the statistical algorithms can be selected such that the overall accuracy in a patient population having a disease prevalence is at least about 60%, and can be, for example, at least about 65%, 70%, 75%, 76%, 77%, 78%, 79%, 80%, 81%, 82%, 83%, 84%, 85%, 86%, 87%, 88%, 89%, 90%, 91%, 92%, 93%, 94%, 95%, 96%, 97%, 98%, or 99%. In preferred embodiments, the overall accuracy of classifying IBS is at least about 80% when a combination of learning statistical classifier systems is used (see, Example 10 from US Patent Publication No. 2008/0085524, which is incorporated herein by reference in its entirety for all purposes).

### VII. Disease Classification System

[0184] FIG. 2 from US Patent Publication No. 2008/0085524, which is incorporated herein by reference in its entirety for all purposes, illustrates a disease classification system (DCS) (200) according to one embodiment of the present invention. As shown therein, a DCS includes a DCS intelligence module (205), such as a computer, having a processor (215) and memory module (210). The intelligence module also includes communication modules (not shown) for transmitting and receiving information over one or more direct connections (e.g., USB, Firewire, or other interface) and one or more network connections (e.g., including a modem or other network interface device). The memory module may include internal memory devices and one or more external memory devices. The intelligence module also includes a display module (225), such as a monitor or printer. In one aspect, the intelligence module receives data such as patient test results from a data acquisition module such as a test system (250), either through a direct connection or over a network (240). For example, the test system may be configured to run multianalyte tests on one or more patient samples (255) and automatically provide the test results to the intelligence module. The data may also be provided to the intelligence module via direct input by a user or it may be downloaded from a portable medium such as a compact disk (CD) or a digital versatile disk (DVD). The test system may be integrated with the intelligence module, directly coupled to the intelligence module, or it may be remotely coupled with the intelligence module over the network. The intelligence module may also communicate data to and from one or more client systems (230) over the network as is well known. For example, a requesting physician or healthcare provider may obtain and view a report from the intelligence module, which may be resident in a laboratory or hospital, using a client system (230).

[0185] The network can be a LAN (local area network), WAN (wide area network), wireless network, point-to-point network, star network, token ring network, hub network, or other configuration. As the most common type of network in current use is a TCP/IP (Transfer Control Protocol and Internet Protocol) network such as the global internetwork of networks often referred to as the “Internet” with a capital “I,” that will be used in many of the examples herein, but it should be understood that the networks that the present invention might use are not so limited, although TCP/IP is the currently preferred protocol.

[0186] Several elements in the system shown in FIG. 2 from US Patent Publication No. 2008/0085524 may include conventional, well-known elements that need not be explained in detail here. For example, the intelligence module could be implemented as a desktop personal computer, workstation, mainframe, laptop, etc. Each client system could include a desktop personal computer, workstation, laptop, PDA, cell phone, or any WAP-enabled device or any other computing device capable of interfacing directly or indirectly to the Internet or other network connection. A client system typically runs an HTTP client, e.g., a browsing program, such as Microsoft's Internet Explorer browser, Netscape's Navigator browser, Opera's browser, or a WAP-enabled browser in the case of a cell phone, PDA or other wireless device, or the like, allowing a user of the client system to access, process, and view information and pages available to it from the intelligence module over the network. Each client system also typically includes one or more user interface devices, such as a keyboard, a mouse, touch screen, pen or the like, for interacting with a graphical user interface (GUI) provided by the browser on a display (e.g., monitor screen, LCD display, etc.) (235) in conjunction with pages, forms, and other information provided by the intelligence module. As discussed above, the present invention is suitable for use with the Internet, which refers to a specific global internetwork of networks. However, it should be understood that other networks can be used instead of the Internet, such as an intranet, an extranet, a virtual private network (VPN), a non-TCP/IP based network, any LAN or WAN, or the like.

[0187] According to one embodiment, each client system and all of its components are operator configurable using applications, such as a browser, including computer code run using a central processing unit such as an Intel® Pentium® processor or the like. Similarly, the intelligence module and all of its components might be operator configurable using application(s) including computer code run using a central processing unit (215) such as an Intel Pentium processor or the like, or multiple processor units. Computer code for operating and configuring the intelligence module to process data and test results as described herein is preferably downloaded and stored on a hard disk, but the entire program code, or portions thereof, may also be stored in any other volatile or non-volatile memory medium or device as is well known, such as a ROM or RAM, or provided on any other computer readable medium (260) capable of storing program code, such as a compact disk (CD) medium, digital versatile disk (DVD) medium, a floppy disk, ROM, RAM, and the like.

[0188] The computer code for implementing various aspects and embodiments of the present invention can be implemented in any programming language that can be executed on a computer system such as, for example, in C, C++, C#, HTML, Java, JavaScript, or any other scripting language, such as VBScript. Additionally, the entire program code, or portions thereof, may be embodied as a carrier signal, which may be transmitted and downloaded from a software source (e.g., server) over the Internet, or over any other conventional network connection as is well known (e.g., extranet, VPN, LAN, etc.) using any communication medium and protocols (e.g., TCP/IP, HTTP, HTTPS, Ethernet, etc.) as are well known.

[0189] According to one embodiment, the intelligence module implements a disease classification process for analyzing patient test results and/or questionnaire responses to determine whether a patient sample is associated with IBS. The data may be stored in one or more data tables or other logical data structures in memory (210) or in a separate storage or database system coupled with the intelligence module. One or more statistical processes are typically applied to a data set including test data for a particular patient. For example, the test data might include a diagnostic marker profile, which comprises data indicating the presence or level of at least one marker in a sample from the patient. The test data might also include a symptom profile, which comprises data indicating the presence or severity of at least one symptom associated with IBS that the patient is experiencing or has recently experienced. In one aspect, a statistical process produces a statistically derived decision classifying the patient sample as an IBS sample or non-IBS sample based upon the diagnostic marker profile and/or symptom profile. In another aspect, a first statistical process produces a first statistically derived decision classifying the patient sample as an IBD sample or non-IBD sample based upon the diagnostic marker profile and/or symptom profile. If the patient sample is classified as a non-IBD sample, a second statistical process is applied to the same or a different data set to produce a second statistically derived decision classifying the non-IBD sample as an IBS sample or non-IBS sample. The first and/or the second statistically derived decision may be displayed on a display device associated with or coupled to the intelligence module, or the decision(s) may be provided to and displayed at a separate system, e.g., a client system (230). The displayed results allow a physician to make a reasoned diagnosis or prognosis.

### VIII. Diseases and Disorders with IBS-like Symptoms

[0190] A variety of structural or metabolic diseases and disorders can cause signs or symptoms that are similar to IBS. As non-limiting examples, patients with diseases and disorders such as inflammatory bowel disease (IBD), Celiac disease (CD), acute inflammation, diverticulitis, ileal pouch-anal anastomosis, microscopic colitis, chronic infectious diarrhea, lactase deficiency, cancer (e.g., colorectal cancer), a mechanical obstruction of the small intestine or colon, an enteric infection, ischemia, maldigestion, malabsorption, endometriosis, and unidentified inflammatory disorders of the intestinal tract can present with abdominal discomfort associated with mild to moderate pain and a change in the consistency and/or frequency of stools that are similar to IBS. Additional IBS-like symptoms can include chronic diarrhea or constipation or an alternating form of each, weight loss, abdominal distention or bloating, and mucus in the stool.

[0191] Most IBD patients can be classified into one of two distinct clinical subtypes, Crohn's disease and ulcerative colitis. Crohn's disease is an inflammatory disease affecting the lower part of the ileum and often involving the colon and other regions of the intestinal tract. Ulcerative colitis is characterized by an inflammation localized mostly in the mucosa and submucosa of the large intestine. Patients suffering from these clinical subtypes of IBD typically have IBS-like symptoms such as, for example, abdominal pain, chronic diarrhea, weight loss, and cramping.

[0192] The clinical presentation of Celiac disease is also characterized by IBS-like symptoms such as abdominal discomfort associated with chronic diarrhea, weight loss, and abdominal distension. Celiac disease is an immune-mediated disorder of the intestinal mucosa that is typically associated with villous atrophy, crypt hyperplasia, and/or inflammation of the mucosal lining of the small intestine. In addition to the malabsorption of nutrients, individuals with Celiac disease are at risk for mineral deficiency, vitamin deficiency, osteoporosis, autoimmune diseases, and intestinal malignancies (e.g., lymphoma and carcinoma). It is thought that exposure to proteins such as gluten (e.g., glutenin and prolamine proteins which are present in wheat, rye, barley, oats, millet, triticale, spelt, and kamut), in the appropriate genetic and environmental context, is responsible for causing Celiac disease.

[0193] Other diseases and disorders characterized by intestinal inflammation that present with IBS-like symptoms include, for example, acute inflammation, diverticulitis, ileal pouch-anal anastomosis, microscopic colitis, and chronic infectious diarrhea, as well as unidentified inflammatory disorders of the intestinal tract. Patients experiencing episodes of acute inflammation typically have elevated C-reactive protein (CRP) levels in addition to IBS-like symptoms. CRP is produced by the liver during the acute phase of the inflammatory process and is usually released about 24 hours post-commencement of the inflammatory process. Patients suffering from diverticulitis, ileal pouch-anal anastomosis, microscopic colitis, and chronic infectious diarrhea typically have elevated fecal lactoferrin and/or calprotectin levels in addition to IBS-like symptoms. Lactoferrin is a glycoprotein secreted by mucosal membranes and is the major protein in the secondary granules of leukocytes. Leukocytes are commonly recruited to inflammatory sites where they are activated, releasing granule content to the surrounding area. This process increases the concentration of lactoferrin in the stool.

[0194] Increased lactoferrin levels are observed in patients with ileal pouch-anal anastomosis (i.e., a pouch is created following complete resection of colon in severe cases of Crohn's disease) when compared to other non-inflammatory conditions of the pouch, like irritable pouch syndrome. Elevated levels of lactoferrin are also observed in patients with diverticulitis, a condition in which bulging pouches (i.e., diverticula) in the digestive tract become inflamed and/or infected, causing severe abdominal pain, fever, nausea, and a marked change in bowel habits. Microscopic colitis is a chronic inflammatory disorder that is also associated with increased fecal lactoferrin levels. Microscopic colitis is characterized by persistent watery diarrhea (non-bloody), abdominal pain usually associated with weight loss, a normal mucosa during colonoscopy and radiological examination, and very specific histopathological changes. Microscopic colitis consists of two diseases, collagenous colitis and lymphocytic colitis. Collagenous colitis is of unknown etiology and is found in patients with long-term watery diarrhea and a normal colonoscopy examination. Both collagenous colitis and lymphocytic colitis are characterized by increased lymphocytes in the lining of the colon. Collagenous colitis is further characterized by a thickening of the sub-epithelial collagen layer of the colon. Chronic infectious diarrhea is an illness that is also associated with increased fecal lactoferrin levels. Chronic infectious diarrhea is usually caused by a bacterial, viral, or protozoan infection, with patients presenting with IBS-like symptoms such as diarrhea and abdominal pain. Increased lactoferrin levels are also observed in patients with IBD.

[0195] In addition to determining CRP and/or lactoferrin and/or calprotectin levels, diseases and disorders associated with intestinal inflammation can also be ruled out by detecting the presence of blood in the stool, such as fecal hemoglobin. Intestinal bleeding that occurs without the patient's knowledge is called occult or hidden bleeding. The presence of occult bleeding (e.g., fecal hemoglobin) is typically observed in a stool sample from the patient. Other conditions such as ulcers (e.g., gastric, duodenal), cancer (e.g., stomach cancer, colorectal cancer), and hemorrhoids can also present with IBS-like symptoms including abdominal pain and a change in the consistency and/or frequency of stools.

[0196] In addition, fecal calprotectin levels can also be assessed. Calprotectin is a calcium binding protein with antimicrobial activity derived predominantly from neutrophils and monocytes. Calprotectin has been found to have clinical relevance in cystic fibrosis, rheumatoid arthritis, IBD, colorectal cancer, HIV, and other inflammatory diseases. Its level has been measured in serum, plasma, oral, cerebrospinal and synovial fluids, urine, and feces. Advantages of fecal calprotectin in GI disorders have been recognized: stable for 3-7 days at room temperature enabling sample shipping through regular mail; correlated to fecal alpha 1-antitrypsin in patients with Crohn's disease; and elevated in a great majority of patients with gastrointestinal carcinomas and IBD. It was found that fecal calprotectin correlates well with endoscopic and histological gradings of disease activity in ulcerative colitis, and with fecal excretion of indium-111-labelled neutrophilic granulocytes, which is a standard of disease activity in IBD.

[0197] In view of the foregoing, it is clear that a wide array of diseases and disorders can cause IBS-like symptoms, thereby creating a substantial obstacle for definitively classifying a sample as an IBS sample. However, the present invention overcomes this limitation by classifying a sample from an individual as an IBS sample using, for example, a statistical algorithm, or by excluding (i.e., ruling out) those diseases and disorders that share a similar clinical presentation as IBS and identifying (i.e., ruling in) IBS in a sample using, for example, a combination of statistical algorithms.

### IX. Therapy and Therapeutic Monitoring

[0198] Once a sample from an individual has been classified as an IBS sample, the methods, systems, and code of the present invention can further comprise administering to the individual a therapeutically effective amount of a drug useful for treating one or more symptoms associated with IBS (i.e., an IBS drug). For therapeutic applications, the IBS drug can be administered alone or co-administered in combination with one or more additional IBS drugs and/or one or more drugs that reduce the side-effects associated with the IBS drug.

[0199] IBS drugs can be administered with a suitable pharmaceutical excipient as necessary and can be carried out via any of the accepted modes of administration. Thus, administration can be, for example, intravenous, topical, subcutaneous, transcutaneous, transdermal, intramuscular, oral, buccal, sublingual, gingival, palatal, intra-joint, parenteral, intra-arteriole, intradermal, intraventricular, intracranial, intraperitoneal, intralesional, intranasal, rectal, vaginal, or by inhalation. By “co-administer” it is meant that an IBS drug is administered at the same time, just prior to, or just after the administration of a second drug (e.g., another IBS drug, a drug useful for reducing the side-effects of the IBS drug, etc.).

[0200] A therapeutically effective amount of an IBS drug may be administered repeatedly, e.g., at least 2, 3, 4, 5, 6, 7, 8, or more times, or the dose may be administered by continuous infusion. The dose may take the form of solid, semi-solid, lyophilized powder, or liquid dosage forms, such as, for example, tablets, pills, pellets, capsules, powders, solutions, suspensions, emulsions, suppositories, retention enemas, creams, ointments, lotions, gels, aerosols, foams, or the like, preferably in unit dosage forms suitable for simple administration of precise dosages.

[0201] As used herein, the term “unit dosage form” refers to physically discrete units suitable as unitary dosages for human subjects and other mammals, each unit containing a predetermined quantity of an IBS drug calculated to produce the desired onset, tolerability, and/or therapeutic effects, in association with a suitable pharmaceutical excipient (e.g., an ampoule). In addition, more concentrated dosage forms may be prepared, from which the more dilute unit dosage forms may then be produced. The more concentrated dosage forms thus will contain substantially more than, e.g., at least 1, 2, 3, 4, 5, 6, 7, 8, 9, 10, or more times the amount of the IBS drug.

[0202] Methods for preparing such dosage forms are known to those skilled in the art (see, e.g., REMINGTON'S PHARMACEUTICAL SCIENCES, 18TH ED., Mack Publishing Co., Easton, Pa. (1990)). The dosage forms typically include a conventional pharmaceutical carrier or excipient and may additionally include other medicinal agents, carriers, adjuvants, diluents, tissue permeation enhancers, solubilizers, and the like. Appropriate excipients can be tailored to the particular dosage form and route of administration by methods well known in the art (see, e.g., REMINGTON'S PHARMACEUTICAL SCIENCES, supra).

[0203] Examples of suitable excipients include, but are not limited to, lactose, dextrose, sucrose, sorbitol, mannitol, starches, gum acacia, calcium phosphate, alginates, tragacanth, gelatin, calcium silicate, microcrystalline cellulose, polyvinylpyrrolidone, cellulose, water, saline, syrup, methylcellulose, ethylcellulose, hydroxypropylmethylcellulose, and polyacrylic acids such as Carbopols, e.g., Carbopol 941, Carbopol 980, Carbopol 981, etc. The dosage forms can additionally include lubricating agents such as talc, magnesium stearate, and mineral oil; wetting agents; emulsifying agents; suspending agents; preserving agents such as methyl-, ethyl-, and propyl-hydroxy-benzoates (i.e., the parabens); pH adjusting agents such as inorganic and organic acids and bases; sweetening agents; and flavoring agents. The dosage forms may also comprise biodegradable polymer beads, dextran, and cyclodextrin inclusion complexes.

[0204] For oral administration, the therapeutically effective dose can be in the form of tablets, capsules, emulsions, suspensions, solutions, syrups, sprays, lozenges, powders, and sustained-release formulations. Suitable excipients for oral administration include pharmaceutical grades of mannitol, lactose, starch, magnesium stearate, sodium saccharine, talcum, cellulose, glucose, gelatin, sucrose, magnesium carbonate, and the like.

[0205] In some embodiments, the therapeutically effective dose takes the form of a pill, tablet, or capsule, and thus, the dosage form can contain, along with an IBS drug, any of the following: a diluent such as lactose, sucrose, dicalcium phosphate, and the like; a disintegrant such as starch or derivatives thereof; a lubricant such as magnesium stearate and the like; and a binder such a starch, gum acacia, polyvinylpyrrolidone, gelatin, cellulose and derivatives thereof. An IBS drug can also be formulated into a suppository disposed, for example, in a polyethylene glycol (PEG) carrier.

[0206] Liquid dosage forms can be prepared by dissolving or dispersing an IBS drug and optionally one or more pharmaceutically acceptable adjuvants in a carrier such as, for example, aqueous saline (e.g., 0.9% w/v sodium chloride), aqueous dextrose, glycerol, ethanol, and the like, to form a solution or suspension, e.g., for oral, topical, or intravenous administration. An IBS drug can also be formulated into a retention enema.

[0207] For topical administration, the therapeutically effective dose can be in the form of emulsions, lotions, gels, foams, creams, jellies, solutions, suspensions, ointments, and transdermal patches. For administration by inhalation, an IBS drug can be delivered as a dry powder or in liquid form via a nebulizer. For parenteral administration, the therapeutically effective dose can be in the form of sterile injectable solutions and sterile packaged powders. Preferably, injectable solutions are formulated at a pH of from about 4.5 to about 7.5.

[0208] The therapeutically effective dose can also be provided in a lyophilized form. Such dosage forms may include a buffer, e.g., bicarbonate, for reconstitution prior to administration, or the buffer may be included in the lyophilized dosage form for reconstitution with, e.g., water. The lyophilized dosage form may further comprise a suitable vasoconstrictor, e.g., epinephrine. The lyophilized dosage form can be provided in a syringe, optionally packaged in combination with the buffer for reconstitution, such that the reconstituted dosage form can be immediately administered to an individual.

[0209] In therapeutic use for the treatment of IBS, an IBS drug can be administered at the initial dosage of from about 0.001 mg/kg to about 1000 mg/kg daily. A daily dose range of from about 0.01 mg/kg to about 500 mg/kg, from about 0.1 mg/kg to about 200 mg/kg, from about 1 mg/kg to about 100 mg/kg, or from about 10 mg/kg to about 50 mg/kg, can be used. The dosages, however, may be varied depending upon the requirements of the individual, the severity of IBS symptoms, and the IBS drug being employed. For example, dosages can be empirically determined considering the severity of IBS symptoms in an individual classified as having IBS according to the methods described herein. The dose administered to an individual, in the context of the present invention, should be sufficient to affect a beneficial therapeutic response in the individual over time. The size of the dose can also be determined by the existence, nature, and extent of any adverse side-effects that accompany the administration of a particular IBS drug in an individual. Determination of the proper dosage for a particular situation is within the skill of the practitioner. Generally, treatment is initiated with smaller dosages which are less than the optimum dose of the IBS drug. Thereafter, the dosage is increased by small increments until the optimum effect under circumstances is reached. For convenience, the total daily dosage may be divided and administered in portions during the day, if desired.

[0210] As used herein, the term “IBS drug” includes all pharmaceutically acceptable forms of a drug that is useful for treating one or more symptoms associated with IBS. For example, the IBS drug can be in a racemic or isomeric mixture, a solid complex bound to an ion exchange resin, or the like. In addition, the IBS drug can be in a solvated form. The term “IBS drug” is also intended to include all pharmaceutically acceptable salts, derivatives, and analogs of the IBS drug being described, as well as combinations thereof. For example, the pharmaceutically acceptable salts of an IBS drug include, without limitation, the tartrate, succinate, tartarate, bitartarate, dihydrochloride, salicylate, hemisuccinate, citrate, maleate, hydrochloride, carbamate, sulfate, nitrate, and benzoate salt forms thereof, as well as combinations thereof and the like. Any form of an IBS drug is suitable for use in the methods of the present invention, e.g., a pharmaceutically acceptable salt of an IBS drug, a free base of an IBS drug, or a mixture thereof.

[0211] Suitable drugs that are useful for treating one or more symptoms associated with IBS include, but are not limited to, serotonergic agents, antidepressants, chloride channel activators, chloride channel blockers, guanylate cyclase agonists, antibiotics, opioids, neurokinin antagonists, antispasmodic or anticholinergic agents, belladonna alkaloids, barbiturates, glucagon-like peptide-1 (GLP-1) analogs, corticotropin releasing factor (CRF) antagonists, probiotics, free bases thereof, pharmaceutically acceptable salts thereof, derivatives thereof, analogs thereof, and combinations thereof. Other IBS drugs include bulking agents, dopamine antagonists, carminatives, tranquilizers, dextofisopam, phenytoin, timolol, and diltiazem.

[0212] Serotonergic agents are useful for the treatment of IBS symptoms such as constipation, diarrhea, and/or alternating constipation and diarrhea. Non-limiting examples of serotonergic agents are described in Cash et al., Aliment. Pharmacol. Ther., 22:1047-1060 (2005), and include 5-HT₃ receptor agonists (e.g., MKC-733, etc.), 5-HT₄ receptor agonists (e.g., tegaserod (Zelnorm), prucalopride, AG1-001, etc.), 5-HT₃ receptor antagonists (e.g., alosetron (Lotronex®), cilansetron, ondansetron, granisetron, dolasetron, ramosetron, palonosetron, E-3620, DDP-225, DDP-733, etc.), mixed 5-HT₃ receptor antagonists/5-HT₄ receptor agonists (e.g., cisapride, mosapride, renzapride, etc.), free bases thereof, pharmaceutically acceptable salts thereof, derivatives thereof, analogs thereof, and combinations thereof. Additionally, amino acids like glutamine and glutamic acid which regulate intestinal permeability by affecting neuronal or glial cell signaling can be administered to treat patients with IBS.

[0213] Antidepressants such as selective serotonin reuptake inhibitor (SSRI) or tricyclic antidepressants are particularly useful for the treatment of IBS symptoms such as abdominal pain, constipation, and/or diarrhea. Non-limiting examples of SSRI antidepressants include citalopram, fluvoxamine, paroxetine, fluoxetine, sertraline, free bases thereof, pharmaceutically acceptable salts thereof, derivatives thereof, analogs thereof, and combinations thereof. Examples of tricyclic antidepressants include, but are not limited to, desipramine, nortriptyline, protriptyline, amitriptyline, clomipramine, doxepin, imipramine, trimipramine, maprotiline, amoxapine, clomipramine, free bases thereof, pharmaceutically acceptable salts thereof, derivatives thereof, analogs thereof, and combinations thereof.

[0214] Chloride channel activators are useful for the treatment of IBS symptoms such as constipation. A non-limiting example of a chloride channel activator is lubiprostone (Amitiza), a free base thereof, a pharmaceutically acceptable salt thereof, a derivative thereof, or an analog thereof. In addition, chloride channel blockers such as crofelemer are useful for the treatment of IBS symptoms such as diarrhea. Guanylate cyclase agonists such as MD-1100 are useful for the treatment of constipation associated with IBS (see, e.g., Bryant et al., Gastroenterol., 128: A-257 (2005)). Antibiotics such as neomycin can also be suitable for use in treating constipation associated with IBS (see, e.g., Park et al., Gastroenterol., 128: A-258 (2005)). Non-absorbable antibiotics like rifaximin (Xifaxan) are suitable to treat small bowel bacterial overgrowth and/or constipation associated with IBS (see, e.g., Sharara et al., Am. J. Gastroenterol., 101:326-333 (2006)).

[0215] Opioids such as kappa opiods (e.g., asimadoline) may be useful for treating pain and/or constipation associated with IBS. Neurokinin (NK) antagonists such as talnetant, saredutant, and other NK2 and/or NK3 antagonists may be useful for treating IBS symptoms such as oversensitivity of the muscles in the colon, constipation, and/or diarrhea. Antispasmodic or anticholinergic agents such as dicyclomine may be useful for treating IBS symptoms such as spasms in the muscles of the gut and bladder. Other antispasmodic or anticholinergic agents such as belladonna alkaloids (e.g., atropine, scopolamine, hyoscyamine, etc.) can be used in combination with barbiturates such as phenobarbital to reduce bowel spasms associated with IBS. GLP-1 analogs such as GTP-010 may be useful for treating IBS symptoms such as constipation. CRF antagonists such as astressin and probiotics such as VSL#3® may be useful for treating one or more IBS symptoms. One skilled in the art will know of additional IBS drugs currently in use or in development that are suitable for treating one or more symptoms associated with IBS.

[0216] An individual can also be monitored at periodic time intervals to assess the efficacy of a certain therapeutic regimen once a sample from the individual has been classified as an IBS sample. For example, the levels of certain markers change based on the therapeutic effect of a treatment such as a drug. The patient is monitored to assess response and understand the effects of certain drugs or treatments in an individualized approach. Additionally, patients may not respond to a drug, but the markers may change, suggesting that these patients belong to a special population (not responsive) that can be identified by their marker levels. These patients can be discontinued on their current therapy and alternative treatments prescribed.

### X. Examples

### A. Example 1

[0217] The present example demonstrates blood sample collection and RNA isolation there from. Briefly, blood samples were collected from three IBS-D patients, two IBS-C patients, and 3 healthy volunteers. All IBS patients met Rome III criteria and healthy volunteers had no history of IBS or other active co-morbidities. In this case, approximately 2.4 ml of whole blood was collected from each subject. The blood sample was divided into two aliquots, and one was processed according to the leukocyte protocol described above, while the other was collected in the PAXgene system (PreAnalytiX; Hombrechtikon, Switzerland) and processed accordingly.

[0218] Because the principal difference between the two techniques is the inclusion of RNA from the erythrocyte fraction, it was investigated whether an overabundance of hemoglobin mRNA might explain the differences in expression between whole blood and leukocyte generated samples. Additional RNA was isolated from whole blood from the healthy subjects using the PAXgene blood collection scheme. Degradation of multiple hemoglobin mRNA species in the samples was accomplished using RNase H and specifically designed primers for nine common hemoglobin genes (Feezor R J et al., Physiol Genomics 19:247-254 (2004)) on four donor samples. Briefly, 5 μg of total cellular RNA was incubated in 10 mM Tris·HCl, pH 7.6, 20 mM KCl with 10 μM of oligonucleotide primers at 70° C. for 5 min. The samples were cooled to 4° C. and 2 U of RNase H (New England Biolabs), along with 20 U of SUPERase Inhibitor (Ambion), was added. The buffer conditions were adjusted to 55 mM Tris·HCl, 85 mM KCl, 3 mM MgCl₂, and 10 mM dithiothreitol, and the samples were incubated at 37° C. for 15 min. Immediately following the incubation, the samples were again cooled to 4° C. and 1 μl of 0.5 M EDTA was added to stop the RNase H digestion. The samples were then repurified using the RNeasy Mini Protocol for RNA Cleanup (Qiagen), according to the manufacturer's specifications and including the optional DNase treatment.

### B. Example 2

[0219] The present example demonstrates hybridization of the extracted mRNA samples to an oligonucleotide array. For analysis of the IBD and control serum RNA samples, Affymetric human Gene 1.0 ST arrays (Affymatrix, Santa Clara, Calif.) were used. These arrays are an oligonucleotide-probe based gene array chip containing ˜35,000 transcripts, which provides a comprehensive coverage of the whole human genome.

[0220] To prepare the RNA samples for hybridization, eight micrograms of total RNA was used to synthesize cDNA. A T7 promoter sequence introduced during the first strand synthesis was then used to direct cRNA synthesis, which was labeled with biotinylated deoxynucleotide triphosphate, following the manufacturer's protocol (Affymatrix, San Diego, Calif.). After fragmentation, the biotinylated cRNA was hybridized to the gene chip array at 45° C. for 16 h. The chip was washed, stained with phycoerytherin-streptavidin, and scanned with the Gene Chip Scanner 3000. After background correction, preliminary data analysis was done in the Microarray Suite 5.0 software (MAS 5.0, Stratagene, La Jolla, Calif.). For primary analysis PLIER was used as recommended in the work flow of software Gene Spring GX10.0 (Agilent Technologies, Santa. Clara).

### Example 3

[0221] The present example describes the data analysis of the microarrays performed, as described in the previous examples. The RNA integrity number (RIN) of each sample and performance of each microarray experiment were analyzed for quality control purposes. The results are given in Table 3.

TABLE 3
RNA sample and microarray quality control matrix.

| | | | Array | Hybridization | Overall |
|---|---|---|---|---|---|
| Array # | Disease | RIN | data QC | control | Notes |
| HG1 | IBS-C | 7.1 | Pass | Pass | Pass |
| HG2 | IBS-C | 5.7 | Pass | Pass | Pass |
| HG3 | IBS-D | 7.1 | Pass | Pass | Pass |
| HG4 | IBS-D | 7.1 | Pass | Pass | Pass |
| HG5 | IBS-D | 7.4 | Pass | Pass | Pass |
| HG6 | HV | 7.9 | Pass | Pass | Pass |
| HG7 | HV | 7.1 | Pass | Pass | Pass |
| HG8 | HV | 8.3 | Pass | Pass | Pass |

[0222] Fluorescence intensities for each probe set were uploaded to the Array Assist 6.5 and Gene Spring GX10.0 (Agilent Technologies, Santa Clara) software. Data was normalized by quantitative normalization, and then transferred logarithmically for further analysis to determine changes in a particular gene in IBS patients. In order to compare the changes in gene expression, the data was further normalized by using the 50 RFU fluorescence value as threshold, and statistical analysis showing fold changes was determined (p≦0.05). The top 72 markers that were identified using 2 log2 fold change as a cutoff are shown in Table 4.

TABLE 4
The top 72 gene markers identified using 2 log2 fold changes.

| | | | Log2 | | | FDR | | |
|---|---|---|---|---|---|---|---|---|
| Entrez | Mean | Mean | Fold | t- | Raw | adjusted | | Gene |
| GeneID | Group 2 | Group 3 | Change | statistic | p-value | p-value | Gene Symbol | Descriptions |
| 27022 | 6.71 | 3.98 | −2.73 | −8.51 | 0.00105 | 0.205 | FOXD3 | forkhead box D3 |
| 55361 | 6.63 | 4.06 | −2.57 | −6.63 | 0.00268 | 0.246 | PI4K2A | phosphatidylinositol 4-kinase type 2 |
| | | | | | | | | alpha |
| 84557 | 8.92 | 6.44 | −2.48 | −10.8 | 0.000417 | 0.198 | MAP1LC3A | microtubule-associated protein 1 |
| | | | | | | | | light chain 3 alpha |
| 55902 | 8.92 | 6.44 | −2.48 | −10.8 | 0.000417 | 0.198 | ACSS2 | acyl-CoA synthetase short-chain |
| | | | | | | | | family member 2 |
| 434 | 6.65 | 4.22 | −2.43 | −6.66 | 0.00264 | 0.246 | ASIP | agouti signaling protein; nonagouti |
| | | | | | | | | homolog (mouse) |
| 391190 | 6.13 | 8.47 | 2.34 | 6.56 | 0.00279 | 0.248 | OR2L8 | olfactory receptor; family 2; |
| | | | | | | | | subfamily L; member 8 |
| 57121 | 9.07 | 6.74 | −2.33 | −7.9 | 0.00139 | 0.216 | LPAR5 | lysophosphatidic acid receptor 5 |
| 10765 | 5.48 | 3.19 | −2.29 | −9.01 | 0.00084 | 0.203 | JARID1B | jumonji; AT rich interactive domain |
| | | | | | | | | 1B |
| 1028 | 6.34 | 4.07 | −2.27 | −7.21 | 0.00196 | 0.232 | CDKN1C | cyclin-dependent kinase inhibitor |
| | | | | | | | | 1C (p57; Kip2) |
| *8137081 | 7.61 | 5.53 | −2.08 | −6.49 | 0.00291 | 0.248 | NA | NA |
| 159686 | 5.39 | 7.32 | 1.93 | 9.63 | 0.00065 | 0.198 | CCDC147 | coiled-coil domain containing 147 |
| *8121330 | 5.52 | 7.43 | 1.91 | 6.64 | 0.00267 | 0.246 | NA | NA |
| 441871 | 8.06 | 6.22 | −1.84 | −8.15 | 0.00123 | 0.216 | PRAMEF7 | PRAME family member 7 |
| 2785 | 11 | 9.17 | −1.83 | −9.66 | 0.000642 | 0.198 | GNG3 | guanine nucleotide binding protein |
| | | | | | | | | (G protein); gamma 3 |
| 55160 | 9.78 | 8 | −1.78 | −7.16 | 0.00201 | 0.232 | ARHGEF10L | Rho guanine nucleotide exchange |
| | | | | | | | | factor (GEF) 10-like |
| 440738 | 10.4 | 8.71 | −1.69 | −7.98 | 0.00134 | 0.216 | MAP1LC3C | microtubule-associated protein 1 |
| | | | | | | | | light chain 3 gamma |
| 128861 | 6.38 | 4.69 | −1.69 | −6.4 | 0.00306 | 0.248 | C20orf71 | chromosome 20 open reading frame |
| | | | | | | | | 71 |
| 92747 | 6.38 | 4.69 | −1.69 | −6.4 | 0.00306 | 0.248 | C20orf114 | chromosome 20 open reading frame |
| | | | | | | | | 114 |
| 55061 | 5.82 | 7.5 | 1.68 | 6.91 | 0.0023 | 0.235 | SUSD4 | sushi domain containing 4 |
| 7582 | 7.23 | 8.91 | 1.68 | 7.49 | 0.0017 | 0.223 | ZNF33B | zinc finger protein 33B |
| 81341 | 2.35 | 3.96 | 1.61 | 8.77 | 0.000932 | 0.204 | OR10W1 | olfactory receptor; family 10; |
| | | | | | | | | subfamily W; member 1 |
| 92241 | 10.9 | 9.32 | −1.58 | −8.54 | 0.00103 | 0.205 | RCSD1 | RCSD domain containing 1 |
| 9720 | 9.27 | 7.69 | −1.58 | −6.75 | 0.00251 | 0.244 | CCDC144A | coiled-coil domain containing 144A |
| 5380 | 5.96 | 7.52 | 1.56 | 18.1 | 5.48E−05 | 0.152 | PMS2L2 | postmeiotic segregation increased 2- |
| | | | | | | | | like 2 pseudogene |
| 26033 | 10.9 | 9.37 | −1.53 | −17.3 | 6.55E−05 | 0.152 | ATRNL1 | attractin-like 1 |
| 143503 | 7.43 | 8.96 | 1.53 | 8.21 | 0.0012 | 0.216 | OR51E1 | olfactory receptor; family 51; |
| | | | | | | | | subfamily E; member 1 |
| *8161024 | 10.3 | 8.77 | −1.53 | −9.35 | 0.000729 | 0.2 | NA | NA |
| 391112 | 7.18 | 8.7 | 1.52 | 8.65 | 0.000983 | 0.204 | OR6Y1 | olfactory receptor; family 6; |
| | | | | | | | | subfamily Y; member 1 |
| 3375 | 4.98 | 3.47 | −1.51 | −6.86 | 0.00236 | 0.24 | IAPP | islet amyloid polypeptide |
| *8110666 | 8.94 | 7.45 | −1.49 | −6.95 | 0.00225 | 0.235 | NA | NA |
| 474354 | 11.4 | 9.92 | −1.48 | −8.56 | 0.00102 | 0.205 | LRRC18 | leucine rich repeat containing 18 |
| 692197 | 10.8 | 9.33 | −1.47 | −8.86 | 0.000896 | 0.204 | SNORD77 | small nucleolar RNA; C/D box 77 |
| 9926 | 8.37 | 9.83 | 1.46 | 6.51 | 0.00287 | 0.248 | LPGAT1 | lysophosphatidylglycerol |
| | | | | | | | | acyltransferase 1 |
| 79102 | 7.12 | 8.58 | 1.46 | 10.2 | 0.000521 | 0.198 | RNF26 | ring finger protein 26 |
| 2703 | 9.34 | 7.91 | −1.43 | −6.43 | 0.00301 | 0.248 | GJA8 | gap junction protein; alpha 8; 50 kDa |
| *8086148 | 9.88 | 8.46 | −1.42 | −14.9 | 0.000118 | 0.189 | NA | NA |
| 221914 | 7.55 | 8.95 | 1.4 | 6.42 | 0.00303 | 0.248 | GPC2 | glypican 2 |
| 183 | 11 | 9.63 | −1.37 | −6.96 | 0.00224 | 0.235 | AGT | angiotensinogen (serpin peptidase |
| | | | | | | | | inhibitor; clade A; member 8) |
| 26052 | 4.04 | 2.7 | −1.34 | −6.4 | 0.00306 | 0.248 | DNM3 | dynamin 3 |
| 644083 | 12.2 | 10.9 | −1.3 | −6.93 | 0.00228 | 0.235 | LOC644083 | hypothetical LOC644083 |
| *8133215 | 6.77 | 5.48 | −1.29 | −13.3 | 0.000185 | 0.198 | NA | NA |
| 27341 | 6.51 | 7.79 | 1.28 | 10.1 | 0.000541 | 0.198 | RRP7A | ribosomal RNA processing 7 |
| | | | | | | | | homolog A (S. cerevisiae) |
| 63926 | 9.03 | 10.3 | 1.27 | 6.83 | 0.0024 | 0.24 | ANKRD5 | ankyrin repeat domain 5 |
| *8102619 | 9.07 | 10.3 | 1.23 | 7.52 | 0.00167 | 0.223 | NA | NA |
| 10223 | 9.19 | 10.4 | 1.21 | 12.8 | 0.000215 | 0.198 | GPA33 | glycoprotein A33 (transmembrane) |
| 100129455 | 9.14 | 7.93 | −1.21 | −8.65 | 0.000983 | 0.204 | LOC100129455 | hypothetical LOC100129455 |
| 23623 | 9.7 | 10.9 | 1.2 | 7.38 | 0.0018 | 0.226 | RUSC1 | RUN and SH3 domain containing 1 |
| 8872 | 8.78 | 9.98 | 1.2 | 7.12 | 0.00206 | 0.232 | CDC123 | cell division cycle 123 homolog |
| | | | | | | | | (S. cerevisiae) |
| *8164100 | 11.7 | 10.5 | −1.2 | −10.4 | 0.000483 | 0.198 | NA | NA |
| 387695 | 8.38 | 7.19 | −1.19 | −10.3 | 0.000501 | 0.198 | C10orf99 | chromosome 10 open reading frame |
| | | | | | | | | 99 |
| 7433 | 4.28 | 3.09 | −1.19 | −7.2 | 0.00197 | 0.232 | VIPR1 | vasoactive intestinal peptide |
| | | | | | | | | receptor 1 |
| 55747 | 9.82 | 11 | 1.18 | 10.7 | 0.000432 | 0.198 | FAM21B | family with sequence similarity 21; |
| | | | | | | | | member B |
| *8125835 | 10.9 | 9.72 | −1.18 | −10.1 | 0.000541 | 0.198 | NA | NA |
| 9219 | 8.87 | 7.7 | −1.17 | −7.89 | 0.0014 | 0.216 | MTA2 | metastasis associated 1 family; |
| | | | | | | | | member 2 |
| *8084945 | 8.6 | 7.44 | −1.16 | −10.6 | 0.000448 | 0.198 | NA | NA |
| *8180355 | 10.7 | 9.55 | −1.15 | −10.2 | 0.000521 | 0.198 | NA | NA |
| 149041 | 9.56 | 10.7 | 1.14 | 7.31 | 0.00186 | 0.229 | RC3H1 | ring finger and CCCH-type zinc |
| | | | | | | | | finger domains 1 |
| 23065 | 6.16 | 7.28 | 1.12 | 7.48 | 0.00171 | 0.223 | KIAA0090 | KIAA0090 |
| 8894 | 10.7 | 9.58 | −1.12 | −11.1 | 0.000375 | 0.198 | EIF2S2 | eukaryotic translation initiation |
| | | | | | | | | factor 2; subunit 2 beta; 38 kDa |
| *8163629 | 8.87 | 7.75 | −1.12 | −7.95 | 0.00136 | 0.216 | NA | NA |
| 79929 | 5.72 | 4.61 | −1.11 | −11.7 | 0.000305 | 0.198 | MAP6D1 | MAP6 domain containing 1 |
| 391196 | 11.9 | 10.8 | −1.1 | −7.64 | 0.00158 | 0.22 | OR2M7 | olfactory receptor; family 2; |
| | | | | | | | | subfamily M; member 7 |
| 728118 | 10.2 | 11.3 | 1.1 | 6.54 | 0.00282 | 0.248 | FAM22A | family with sequence similarity 22; |
| | | | | | | | | member A |
| *8178811 | 8.6 | 9.7 | 1.1 | 7.18 | 0.00199 | 0.232 | NA | NA |
| 53836 | 11.6 | 10.5 | −1.1 | −7.56 | 0.00164 | 0.222 | GPR87 | G protein-coupled receptor 87 |
| *8180003 | 8.48 | 9.58 | 1.1 | 7.22 | 0.00195 | 0.232 | NA | NA |
| 55720 | 11.7 | 10.6 | −1.1 | −7.02 | 0.00217 | 0.234 | TSR1 | TSR1; 20S rRNA accumulation; |
| | | | | | | | | homolog (S. cerevisiae) |
| 8756 | 5.69 | 6.75 | 1.06 | 6.45 | 0.00297 | 0.248 | ADAM7 | ADAM metallopeptidase domain 7 |
| 3735 | 6.15 | 7.21 | 1.06 | 6.68 | 0.00261 | 0.246 | KARS | lysyl-tRNA synthetase |
| 339390 | 8.12 | 7.1 | −1.02 | −7.35 | 0.00182 | 0.227 | CLEC4G | C-type lectin superfamily 4; member G |
| 5314 | 7.5 | 6.49 | −1.01 | −9.22 | 0.000769 | 0.2 | PKHD1 | polycystic kidney and hepatic |
| | | | | | | | | disease 1 (autosomal recessive) |
| *8118824 | 7.64 | 6.63 | −1.01 | −7.59 | 0.00162 | 0.222 | NA | NA |

*ProbeSet ID number; refers to the identity of the probe used in the Affymetric human Gene 1.0 ST array.

[0223] Genes, which qualified in the stringent statistical tests, were used for gene ontology and pathway analysis. Expression data sets containing gene identifier and their corresponding expression values, as fold-changes, were uploaded as a tab-delimited text file to the Ingenuity pathway Analysis (IPA) software (Ingenuity systems, Mountain view, Calif.). Genes, which mapped to the ingenuity pathway database, were categorized based on molecular functions, gene ontology and biological processes. Each class was grouped based on their p-value. The identified genes named as focused genes were also mapped to genetic networks in the IPA database and ranked by score. The calculated probability score represented whether a collection of genes in a network could be found by chance alone.

### MASS Algorithm

[0224] Microarray Analysis Suite 5.0 (MAS 5.0) algorithm was developed by Affymetrix to measure the relative intensities from microarray experiments using the Affymetrix GeneChip arrays. The signal is calculated using the One-Step Tukey's Biweight Estimate, which yields a robust weighted mean that is relatively insensitive to outliers. The Tukey's Biweight method gives an estimate of the amount of variation in the data, exactly as standard deviation measures the amount of variation for an average. MAS 5.0 subtracts a “stray signal” estimate from the PM signal that is based on the intensity of the MM signal. However, in cases where the MM signal outweighs the PM signal, an adjusted value is used. These adjustments will eliminate negative values.

### RMA Algorithm

[0225] The data from the eight microarrays was also pre-processed using the RMA Algorithm (Irizarry, R A et al., Biostatistics, 4, 249-264 (2003)). The output of the algorithm is raw gene expression intensities expressed in log2 scale. A plot of the intensities of all of the samples is shown in FIG. 1.

### ANOVA Test

[0226] Analysis of variance (ANOVA) is a collection of statistical models, and their associated procedures, in which the observed variance is partitioned into components due to different explanatory variables. ANOVA is commonly used to compare the means of more than 2 groups.

[0227] An analysis of variance (ANOVA) was preformed on each probe set. The test is designed to detect differentially expressed genes (DEGs) between any pair of groups. The p-values were adjusted to control the false discovery rate (FDR) in multiple hypothesis tests (Benjamini & Hochberg, 1995). Table 4 shows a number of DEGs at various raw p-value and FDR-adjusted p-value thresholds. Using a threshold of p.fdr <0.25, there are 228 differentially expressed genes (DEGs) cumulatively. The gene expression levels of the top 5 DEGs are plotted in FIG. 2.

### Multiple Hypothesis Test

[0228] In a hypothesis test, an acceptable maximum probability of rejecting the null hypothesis when it is true, thus committing a Type I error, is typically specified. In a microarray study, a large number of hypothesis tests are performed. When many hypotheses are tested, and each test has a specified Type I error probability, the probability that at least some Type I errors are committed increase, often sharply, with the number of hypotheses. To control the overall Type I error, an adjustment on statistical test p-values is applied to control the overall false discovery rate or FDR (Benjamini & Hochberg, 1995). Other available multiple hypothesis correction methods include Bonferroni correction in which the p-values are multiplied by the number of comparisons, Holm correction (Holm, 1979), Hochberg correction (Hochberg, 1988), and Hommel correction (Hommel, 1988).

### Hierarchical Clustering Analysis

[0229] Hierarchical clustering analysis is a statistical method for finding relatively homogeneous clusters of cases based on measured characteristics. It starts with each case in a separate cluster and then combines the clusters sequentially, reducing the number of clusters at each step until only one cluster is left. When there are N cases, this involves N−1 clustering steps, or fusions. A heatmap with two dimension hierarchical clustering results are frequently used in the microarray analysis to demonstrate the sample and gene clustering structure based on gene expression profiles.

[0230] Hierarchical clustering analysis was performed to explore whether the gene expression profiles of the DEGs can separate the IBS and control samples into distinct classes. All unmasked probe sets were used in this analysis. FIG. 3 shows the clustering results and FIG. 4 provides a heatmap illustrating the differential expression of a set of genes the include the selected 72-gene subset shown in Table 4. The IBS-C (group 1; HG1 and 2), IBS-D (group 2; HG3, 4, and 5), and control (group 3; HG6, 7, and 8) groups are completely separated by the gene expression profiles of the DGEs, which are indicated by the color panel on the top of the heatmap.

### Multidimensional Scaling

[0231] Multidimensional scaling (MDS) is a set of related statistical techniques often used in information visualization for exploring similarities or dissimilarities in data. MDS is a special case of ordination. An MDS algorithm starts with a matrix of item—item similarities, then assigns a location of each item in a low-dimensional space, suitable for 2D or 3D visualization. A plot of the separation among samples based on the gene expression profiles of all unmasked probe sets is shown in FIG. 5.

### Principal Component Analysis

[0232] Principal component analysis (PCA) involves a mathematical procedure that transforms a number of (possibly) correlated variables into a (smaller) number of uncorrelated variables called principal components. The first principal component accounts for as much of the variability in the data as possible, and each succeeding component accounts for as much of the remaining variability as possible. FIG. 6A illustrates the variation that can be explained by each of the top principal components. FIG. 6B illustrates the separation of the samples by the top 2 principal components.

[0233] T-Test

[0234] The t-test assesses whether the means of two groups are statistically different from each other. This analysis allows for comparison of the means of two groups. A pair-wise t-test was performed between each pair of groups. Fold change, p-value and FDR-adjusted p-value (Benjamini & Hochberg, 1995) were computed for each probe set on the array in each comparison. Differentially expressed genes (DEGs) were defined as those genes that have a FDR-adjusted p-value <0.25 and a 2 log2 fold change >2. For example, Table 4 shows 72 DEGs between Group 2 and Group 3 ordered by fold change.

### Volcano Plot

[0235] Volcano plot arranges genes along dimensions of biological and statistical significance. The first (horizontal) dimension is the fold change between the two groups (on a log scale, so that up and down regulation appear symmetric), and the second (vertical) axis represents the p-value for a t-test of differences between samples (most conveniently on a negative log scale, such that smaller p-values appear higher up). The first axis indicates biological impact of the change; the second indicates the statistical evidence, or reliability of the change.

[0236] Volcano plots show the relationship between biological significance (fold change) and statistical significance (p-value). FIGS. 7A-C show volcano plots of the comparison between each pair of groups ((A) IBS-C vs IBS-D groups, (B) IBS-C vs control groups, and (C) IBS-D vs control groups). Although the raw p-values are plotted on Y-axis, DEGs were determined by a threshold of FDR-adjusted p-value <0.25 and fold change >2, the boundaries of which are marked with a dashed line in FIG. 7C. DEGs are highlighted in red color.

### Fisher Exact Test

[0237] The Fisher exact test is a statistical test used to determine if there are nonrandom associations between two categorical variables. The Fisher Exact Test looks at a contingency table which displays how the first variable affects the second variable or in reverse. Its null hypothesis is that the two are independent.

### C. Example 3

[0238] In order to verify the utility of the IBS markers identified by the microarray experiments, the mRNA expression levels of five identified genes were validated using quantitative reverse transcript-polymerase chain reaction (qRT-PCR) analysis. Briefly, cDNA was synthesized from RNA samples from 12 IBS-M, 22 IBS-C, 12 IBS-D, and 21 control subjects by PCR RNA core kit (Applied Biosystems, Bedford, Mass.). Real time quantitative reverse transcript-polymerase chain reaction (qRT-PCR) with SYBER Green, using gene-specific PCR primers, was performed to verify the microarray data. Five genes (FOXD3, PI4K2A, ACSS2, ASIP, and OR2L8), having Log2 fold changes >2 and FDR adjusted p-values <0.25, were selected and primers used to amplify each gene were generated. Samples were run in triplicate, and PCR was performed by an ABI 7700 thermocycler (Applied Biosystems, Bedford, Mass.). Results of the qRT-PCR analysis is shown in FIG. 8.

### D. Example 4

[0239] To further validate the utility of the novel gene expression IBS markers identified above, the expression levels of 14 of the top 72 discovery phase genes, as determined by Log2-fold change, were assayed in a clinical study of independently ascertained, consecutively enrolled, prospective cohorts of 98 patients with IBS. Each patient was diagnosed by a board-certified gastroenterologist; IBS was confirmed by biopsy and IBS met Rome III criteria. All protocols were IRB approved; informed consent was obtained and peripheral blood samples and clinical data were collected from all patients. Expression data was obtained from peripheral whole blood samples by isolating total mRNAs, synthesizing cDNAs, and performing real-time quantitative PCR. Expression levels of the candidate biomarker genes were assayed on each patient specimen and normalized to a within-patient reference gene. The expression levels of the selected biomarkers is shown in FIGS. 9A-C.

[0240] cDNA was synthesized from RNA samples by PCR RNA core kit (Applied Biosystems, Bedford, Mass.). Real time quantitative reverse transcript-polymerase chain reaction (qRT-PCR) with SYBER Green, using gene-specific PCR primers, was performed to verify the microarray data. Samples were run in triplicate, and PCR was performed by an ABI 7700 thermocycler (Applied Biosystems, Bedford, Mass.). Expression of the house keeping gene β-actin was determined for normalization, following the geNorm method. A linear regression analysis was performed and the coefficient of variation was calculated to assess a correlation between the RT-PCR and gene array results of these selected genes. Log2-fold changes and p-values for the expression of the candidate genes is shown in Table 5.

TABLE 5
Log2-fold changes and calculated p-values for the 14 selected
candidate IBS marker genes validated by qRT-PCR.

| | | P |
|---|---|---|
| GENE | SCORE | VALUE |
| CCDC147 | 6.425 | 0.011 |
| VIPR1 | 4.818 | 0.028 |
| LPAR5 | 3.881 | 0.049 |
| CCDC144A | 2.944 | 0.086 |
| GNG3 | 2.901 | 0.089 |
| ACSS2 | 2.516 | 0.113 |
| ZNF33B | 1.902 | 0.168 |
| PMS2L2 | 1.629 | 0.202 |
| RUSC1 | 1.384 | 0.239 |
| ARHGE | 1.226 | 0.268 |
| ASIP | 1.119 | 0.29 |
| OR2L8 | 1.094 | 0.296 |
| PI4K2A | 0.578 | 0.447 |
| FOXD3 | 0.553 | 0.457 |

### E. Example 5

[0241] In order to further determine the gene expression patterns most predictive of IBS, the raw gene expression data obtained in Example 2 was analyzed by using analysis of variance (ANOVA) to compare the means of hybridization signals in all three groups. IBS-D and healthy volunteer groups were compared using t-test. Genes that are statistically different in the two groups were assesed. The analysis software used are Affymetrix Command Console, Affymetrix Expression Console, and R.

### Network, Gene Ontology and Canonical Pathways Analysis

[0242] Genes, which qualified in the stringent statistical tests, were used for gene ontology and pathway analysis. Expression data sets containing gene identifier and their corresponding expression values, as fold-changes, were uploaded as a tab-delimited text file to the Ingenuity pathway Analysis (IPA) software (Ingenuity systems, Mountain view, Calif.). Genes, which mapped to the ingenuity pathway database, were categorized based on molecular functions, gene ontology and biological processes. Each class was grouped based on their p-value. The identified genes named as focused genes were also mapped to genetic networks in the IPA database and ranked by score. The calculated probability score represented whether a collection of genes in a network could be found by chance alone.

mRNA Expression Assay by Quantitative Reverse Transcript-Polymerase Chain Reaction (qRT-PCR)

[0243] 66 selected genes were further validated by qRT-PCR. cDNA was synthesized from RNA samples by PCR RNA core kit (Applied Biosystems, Bedford, Mass.). Real time quantitative reverse transcript-polymerase chain reaction (qRT-PCR) with SYBER Green, using gene-specific PCR primers, was performed to verify the microarray data. Eleven genes were selected randomly and the primers used to amplify each gene are listed in the Additional File-1. Samples were run in triplicate, and PCR was performed by an ABI 7700 thermocycler (Applied Biosystems, Bedford, Mass.). Expression of multiple house keeping genes (GNB, β-actin, GAPDH and tubulin) were simultaneously determined for normalization, following the geNorm method. A linear regression analysis was performed and the coefficient of variation was calculated to assess a correlation between the RT-PCR and gene array results of these 11 randomly selected genes.

Identification of Differential Expressed Genes from the Affymetrix Chip Study.

[0244] Briefly, an analysis of variance (ANOVA) was performed on each probe set. The test is designed to detect differentially expressed genes between any pair of groups. The p-values were adjusted to control the false discovery rate (FDR) in multiple hypothesis tests (Benjamini & Hochberg, 1995). Using a threshold of p.fdr <0.25, 228 differentially expressed genes (DEGs) were identified cumulatively. A hierarchical clustering analysis was then performed to explore whether the gene expression profiles of the DEGs can separate samples into distinct classes. All unmasked probe sets were used in this analysis. FIG. 4 shows the clustering results. Three groups are completely separated by the gene expression profiles of the DGEs, which indicated by the color panel on the top of the heatmap (FIG. 4). The separation among samples was further visualized based on the gene expression profiles of all unmasked probe sets using a multidimensional scaling plot. (FIG. 5).

[0245] In order to select differentially expressed genes, a pair-wise t-test was performed between each pair of groups. Fold change, p value and FDR-adjusted p-value (Benjamini & Hochberg, 1995) were computed for each probe set on the array in each comparison. Differentially expressed genes (DEGs) were defined as those genes that have a FDR-adjusted p-value <0.25 and a fold change >2. For example, Table 6 shows 40 DEGs between IBS-D and healthy volunteers ordered by fold change. Complete list oft-test DEGs between each pair of groups are conducted. In order to identify genes which can be used for both IBS-C and IBS-D subgroup diagnosis, selected 26 genes were further selected which are up regulated in both groups based on fold changes and P values (Table 7).

[0246] Real time quantitative PCR validation of selected differently expressed genes (DEGs). The 66 selected genes that identified from the microarray data analysis were further validated by q-PCR using the probes purchased from Applied Biosystems (Table 8). Relative expression of the selected genes were measured by standardizing expression of each gene with beta-actin in Paxgene blood samples from 27 healthy volunteers, 19 IBS-C, 22 IBS-D, and 17 IBS-M patients. Among the 66 selected genes, 16 genes were not detectable by RT q-PCR. The relative expression in the remaining 50 genes largely confirmed the microarray results with reference to fold change levels of individual IBS patients. Data for 36 of these q-PCR reactions is shown in FIG. 10. In addition, qRT-PCR data was also obtained for 5 targeted genes (SERT, TPH1, MAO-A, TLR2, and TLR4), which were not differentially expressed in IBS-C, IBS-D, and IBS-M patients (FIG. 11).

TABLE 6
Top 40 genes that differentially expressed in IBS-D vs. healthy volunteers.

| | | | Fold | t | | |
|---|---|---|---|---|---|---|
| Gene | IBS-D | HV | Change | statistic | P value | Gene Descriptions |
| CCDC147 | 5.39 | 7.32 | 6.8895 | 9.63 | 0.0007 | coiled-coil domain containing 147 |
| PI4K2A | 6.63 | 4.06 | 13.066 | −6.63 | 0.0027 | phosphatidylinositol 4-kinase type 2 alpha |
| ACSS2 | 8.92 | 6.44 | 11.941 | −10.8 | 0.0004 | acyl-CoA synthetase short-chain family member 2 |
| ASIP | 6.65 | 4.22 | 11.359 | −6.66 | 0.0026 | agouti signaling protein; nonagouti homolog (mouse) |
| OR2L8 | 6.13 | 8.47 | 10.381 | 6.56 | 0.0028 | olfactory receptor; family 2; subfamily L; member 8 |
| LPAR5 | 9.07 | 6.74 | 10.278 | −7.9 | 0.0014 | lysophosphatidic acid receptor 5 |
| JARID1B | 5.48 | 3.19 | 9.8749 | −9.01 | 0.0008 | jumonji; AT rich interactive domain 1B |
| CDKN1C | 6.34 | 4.07 | 9.6794 | −7.21 | 0.0020 | cyclin-dependent kinase inhibitor 1C (p57; Kip2) |
| MAP1LC3A | 8.92 | 6.44 | 11.941 | −10.8 | 0.0004 | microtubule-associated protein 1 light chain 3 alpha |
| FOXD3 | 6.71 | 3.98 | 15.333 | −8.51 | 0.0011 | forkhead box D3 |
| MAP1LC3A | 8.92 | 6.44 | 11.941 | −10.8 | 0.0004 | microtubule-associated protein 1 light chain 3 alpha |
| PRAMEF7 | 8.06 | 6.22 | 6.2965 | −8.15 | 0.0012 | PRAME family member 7 |
| GNG3 | 11 | 9.17 | 6.2339 | −9.66 | 0.0006 | guanine nucleotide binding protein (G protein); g3 |
| ARHGEF10L | 9.78 | 8 | 5.9299 | −7.16 | 0.0020 | Rho guanine nucleotide exchange factor (GEF) 10L |
| MAP1LC3C | 10.4 | 8.71 | 5.4195 | −7.98 | 0.0013 | microtubule-associated protein 1 light chain 3 |
| | | | | | | gamma |
| C20orf71 | 6.38 | 4.69 | 5.4195 | −6.4 | 0.0031 | chromosome 20 open reading frame 71 |
| C20orf114 | 6.38 | 4.69 | 5.4195 | −6.4 | 0.0031 | chromosome 20 open reading frame 114 |
| SUSD4 | 5.82 | 7.5 | 5.3656 | 6.91 | 0.0023 | sushi domain containing 4 |
| ZNF33B | 7.23 | 8.91 | 5.3656 | 7.49 | 0.0017 | zinc finger protein 33B |
| OR10W1 | 2.35 | 3.96 | 5.0028 | 8.77 | 0.0009 | olfactory receptor; family 10; subfamily W; member 1 |
| RCSD1 | 10.9 | 9.32 | 4.855 | −8.54 | 0.0010 | RCSD domain containing 1 |
| CCDC144A | 9.27 | 7.69 | 4.855 | −6.75 | 0.0025 | coiled-coil domain containing 144A |
| PMS2L2 | 5.96 | 7.52 | 4.7588 | 18.1 | 0.0001 | postmeiotic segregation increased 2-like 2 |
| ATRNL1 | 10.9 | 9.37 | 4.6182 | −17.3 | 0.0001 | attractin-like 1 |
| OR51E1 | 7.43 | 8.96 | 4.6182 | 8.21 | 0.0012 | olfactory receptor; family 51; subfamily E; member 1 |
| OR6Y1 | 7.18 | 8.7 | 4.5722 | 8.65 | 0.0010 | olfactory receptor; family 6; subfamily Y; member 1 |
| IAPP | 4.98 | 3.47 | 4.5267 | −6.86 | 0.0024 | islet amyloid polypeptide |
| LRRC18 | 11.4 | 9.92 | 4.3929 | −8.56 | 0.0010 | leucine rich repeat containing 18 |
| SNORD77 | 10.8 | 9.33 | 4.3492 | −8.86 | 0.0009 | small nucleolar RNA; C/D box 77 |
| LPGAT1 | 8.37 | 9.83 | 4.306 | 6.51 | 0.0029 | lysophosphatidylglycerol acyltransferase 1 |
| RNF26 | 7.12 | 8.58 | 4.306 | 10.2 | 0.0005 | ring finger protein 26 |
| GJA8 | 9.34 | 7.91 | 4.1787 | −6.43 | 0.0030 | gap junction protein; alpha 8; 50 kDa |
| GPC2 | 7.55 | 8.95 | 4.0552 | 6.42 | 0.0030 | glypican 2 |
| AGT | 11 | 9.63 | 3.9354 | −6.96 | 0.0022 | angiotensinogen (serpin peptidase inhibitor) |
| DNM3 | 4.04 | 2.7 | 3.819 | −6.4 | 0.0031 | dynamin 3 |
| LOC644083 | 12.2 | 10.9 | 3.6693 | −6.93 | 0.0023 | hypothetical LOC644083 |
| RRP7A | 6.51 | 7.79 | 3.5966 | 10.1 | 0.0005 | ribosomal RNA processing 7 homolog A (S. cerevisiae) |
| ANKRD5 | 9.03 | 10.3 | 3.5609 | 6.83 | 0.0024 | ankyrin repeat domain 5 |
| GPA33 | 9.19 | 10.4 | 3.3535 | 12.8 | 0.0002 | glycoprotein A33 (transmembrane) |
| LOC100129455 | 9.14 | 7.93 | 3.3535 | −8.65 | 0.0010 | hypothetical LOC100129455 |
| RUSC1 | 9.7 | 10.9 | 3.3201 | 7.38 | 0.0018 | RUN and SH3 domain containing 1 |

TABLE 7
26 genes which are up regulated in both groups (IBS-C and IBS-D) based on fold
changes and P values.

| | | | | Log2 fold | | | | | | |
|---|---|---|---|---|---|---|---|---|---|---|
| | | | | change | | t statistic | | p-value | | |
| Gene | | | | IBS-C | IBS-D | IBS-C | IBS-D | IBS-C | IBS-D | |
| Symbol | IBS-C | IBS-D | HV | vs HV | vs HV | vs HV | vs HV | vs HV | vs HV | Gene Descriptions |
| LOC399898 | 9.79 | 10.6 | 7.91 | 6.55 | 14.73 | −4.59 | −6.32 | 0.019 | 0.003 | hypothetical gene supported |
| | | | | | | | | | | by AK128188 |
| C20orf70 | 7.67 | 7.64 | 5.81 | 6.42 | 6.23 | −8.94 | −6.06 | 0.003 | 0.004 | chromosome 20 open |
| | | | | | | | | | | reading frame 70 |
| CHRNB2 | 8.37 | 8.73 | 7.06 | 3.71 | 5.31 | −4.3 | −5.7 | 0.023 | 0.005 | cholinergic receptor; |
| | | | | | | | | | | nicotinic; beta 2 (neuronal) |
| OR51B4 | 8.13 | 8.91 | 6.3 | 6.23 | 13.6 | −4.71 | −5.57 | 0.018 | 0.005 | olfactory receptor; family |
| | | | | | | | | | | 51; subfamily B |
| ZNF326 | 11.1 | 11.2 | 9.64 | 4.31 | 4.76 | −5.08 | −5.4 | 0.015 | 0.006 | zinc finger protein 326 |
| CBFA2T2 | 6.85 | 6.47 | 4.68 | 8.76 | 5.99 | −13.7 | −5.14 | 0.001 | 0.007 | core-binding factor; runt |
| | | | | | | | | | | domain; alpha subunit 2 |
| TACR2 | 11.7 | 12 | 10.2 | 4.48 | 6.05 | −4.25 | −5.13 | 0.024 | 0.007 | tachykinin receptor 2 |
| OR4C6 | 8.23 | 8.19 | 6.22 | 7.46 | 7.17 | −4.29 | −4.09 | 0.023 | 0.015 | olfactory receptor; family 4; |
| | | | | | | | | | | subfamily C; member 6 |
| MYBPC3 | 7.98 | 7.87 | 6.44 | 4.66 | 4.18 | −4.88 | −3.67 | 0.017 | 0.021 | myosin binding protein C; |
| | | | | | | | | | | cardiac |
| SCGB1C1 | 6.42 | 5.05 | 3.81 | 13.6 | 3.46 | −3.69 | −3.19 | 0.035 | 0.033 | secretoglobin; family 1C; |
| | | | | | | | | | | member 1 |
| HSD17B11 | 8.17 | 8.29 | 6.79 | 3.97 | 4.48 | −4.97 | −3.07 | 0.016 | 0.037 | hydroxysteroid (17-beta) |
| | | | | | | | | | | dehydrogenase 11 |
| SLC33A1 | 8.17 | 8.29 | 6.79 | 3.97 | 4.48 | −4.97 | −3.07 | 0.016 | 0.037 | solute carrier family 33 |
| | | | | | | | | | | (acetyl-CoA transporter); |
| ABCG2 | 8.17 | 8.29 | 6.79 | 3.97 | 4.48 | −4.97 | −3.07 | 0.016 | 0.037 | ATP-binding cassette; sub- |
| | | | | | | | | | | family G (WHITE); |
| HSD17B13 | 8.17 | 8.29 | 6.79 | 3.97 | 4.48 | −4.97 | −3.07 | 0.016 | 0.037 | hydroxysteroid (17-beta) |
| | | | | | | | | | | dehydrogenase 13 |
| PLCH1 | 8.17 | 8.29 | 6.79 | 3.97 | 4.48 | −4.97 | −3.07 | 0.016 | 0.037 | phospholipase C; eta 1 |
| LSP1 | 11.1 | 11.2 | 9.52 | 4.85 | 5.37 | −2.79 | −3 | 0.068 | 0.04 | lymphocyte-specific protein 1 |
| MBL2 | 6.84 | 7.19 | 5.01 | 6.23 | 8.85 | −3.35 | −2.97 | 0.044 | 0.041 | mannose-binding lectin |
| | | | | | | | | | | (protein C) 2; soluble |
| CCDC65 | 10.5 | 9.59 | 8.26 | 9.39 | 3.78 | −7.64 | −2.95 | 0.005 | 0.042 | coiled-coil domain |
| | | | | | | | | | | containing 65 |
| NES | 6.8 | 6.12 | 4.64 | 8.67 | 4.39 | −5.48 | −2.94 | 0.012 | 0.042 | nestin |
| MICALL1 | 8.28 | 8.09 | 6.58 | 5.47 | 4.53 | −3.01 | −2.9 | 0.057 | 0.044 | MICAL-like 1 |
| WBP2NL | 9.7 | 9.23 | 8.03 | 5.31 | 3.32 | −6.87 | −2.75 | 0.006 | 0.051 | WBP2 N-terminal like |
| TRIM48 | 4.96 | 5.08 | 3.64 | 3.74 | 4.22 | −4.45 | −2.75 | 0.021 | 0.051 | tripartite motif-containing |
| | | | | | | | | | | 48 |
| SH3BGRL3 | 6.76 | 5.59 | 3.31 | 31.5 | 9.78 | −8.61 | −2.63 | 0.003 | 0.058 | SH3 domain binding |
| | | | | | | | | | | glutamic acid-rich protein |
| | | | | | | | | | | like 3 |
| LDLR | 9.23 | 9.04 | 7.35 | 6.55 | 5.42 | −3.04 | −2.63 | 0.056 | 0.058 | low density lipoprotein |
| | | | | | | | | | | receptor |
| RAB7L1 | 5.88 | 4.3 | 2.48 | 29.96 | 6.17 | −8.88 | −2.54 | 0.003 | 0.064 | RAB7; member RAS |
| | | | | | | | | | | oncogene family-like 1 |
| WEE1 | 6.69 | 4.87 | 3.71 | 19.69 | 3.19 | −3.01 | −2.36 | 0.057 | 0.078 | WEE1 homolog (S. pombe) |

TABLE 8
66 differentially expressed genes selected for qRT-PCR validation.

| Gene Symbol | Gene Name | Assay ID |
|---|---|---|
| FOXD3 | forkhead box D3 | Hs00255287_s1 |
| PI4K2A | phosphatidylinositol 4-kinase type 2 alpha | Hs00218300_m1 |
| ACSS2 | acyl-CoA synthetase short-chain family member 2 | Hs00218766_m1 |
| ASIP | agouti signaling protein, nonagouti homolog (mouse) | Hs00181770_m1 |
| OR2L8 | olfactory receptor, family 2, subfamily L, member 8 | Hs02338632_g1 |
| LPAR5 | lysophosphatidic acid receptor 5 | Hs01051307_m1 |
| JARID1B | jumonji, AT rich interactive domain 1B | Hs00981910_m1 |
| CDKN1C | cyclin-dependent kinase inhibitor 1C (p57, Kip2) | Hs00175938_m1 |
| CCDC147 | coiled-coil domain containing 147 | Hs01001247_m1 |
| GNG3 | guanine nucleotide binding protein (G protein), gamma 3 | Hs00360009_g1 |
| ARHGEF10 | Rho guanine nucleotide exchange factor (GEF) 10 | Hs00744267_s1 |
| C20orf71 | chromosome 20 open reading frame 71 | Hs00420455_m1 |
| C20orf114 | chromosome 20 open reading frame 114 | Hs01113243_m1 |
| SUSD4 | sushi domain containing 4 | Hs00215864_m1 |
| ZNF33B | zinc finger protein 33B | Hs00300609_s1 |
| OR10W1 | olfactory receptor, family 10, subfamily W, member 1 | Hs01398519_s1 |
| RCSD1 | RCSD domain containing 1 | Hs00364590_m1 |
| CCDC144A | coiled-coil domain containing 144 family | Hs00417617_m1 |
| PMS2L2 | postmeiotic segregation increased 2-like 2 pseudogene | Hs02379621_u1 |
| ATRNL1 | attractin-like 1 | Hs00390459_m1 |
| OR51E1 | olfactory receptor, family 51, subfamily E, member 1 | Hs00379183_m1 |
| IAPP | islet amyloid polypeptide | Hs00169095_m1 |
| LRRC18 | leucine rich repeat containing 18 | Hs00736427_m1 |
| SNORD77 | lysophosphatidylglycerol acyltransferase 1 | Hs00360353_m1 |
| RNF26 | ring finger protein 26 | Hs00259249_s1 |
| GJA8 | gap junction protein, alpha 8, 50 kDa | Hs01102028_m1 |
| GPC2 | glypican 2 | Hs00415099_m1 |
| AGT | angiotensinogen (serpin peptidase inhibitor) | Hs00174854_m1 |
| DNM3 | dynamin 3 | Hs00399015_m1 |
| RRP7A | ribosomal RNA processing 7 homolog A (S. cerevisiae) | Hs00414229_m1 |
| ANKRD5 | ankyrin repeat domain 5 | Hs00223080_m1 |
| GPA33 | glycoprotein A33 (transmembrane) | Hs00170690_m1 |
| RUSC1 | RUN and SH3 domain containing 1 | Hs00204904_m1 |
| CDC123 | cell division cycle 123 homolog (S. cerevisiae) | Hs00195709_m1 |
| VIPR1 | vasoactive intestinal peptide receptor 1 | Hs00270351_m1 |
| MTA2 | metastasis associated 1 family, member 2 | Hs00191018_m1 |
| RC3H1 | ring finger and CCCH-type zinc finger domains 1 | Hs02577215_m1 |
| KIAA0090 | KIAA0090 | Hs01076375_m1 |
| GPR87 | G protein-coupled receptor 87 | Hs00225057_m1 |
| MAP6D1 | MAP6 domain containing 1 | Hs00227533_m1 |
| LOC399898 | hypothetical gene supported by AK128188 | Hs02385591_s1 |
| c20orf70 | chromosome 20 open reading frame 70 | Hs00395980_m1 |
| CHRNB2 | cholinergic receptor, nicotinic, beta 2 (neuronal) | Hs00181267_m1 |
| OR51B4 | olfactory receptor, family 51, subfamily B, member 4 | Hs00264159_s1 |
| ZNF326 | zinc finger protein 326 | Hs00299025_m1 |
| CBFA2T2 | core-binding factor, runt domain, alpha subunit 2; | Hs00955778_m1 |
| | translocated to, 2 | |
| TACR2 | tachykinin receptor 2 | Hs00169052_m1 |
| OR4C6 | olfactory receptor, family 4, subfamily C, member 6 | Hs01943294_s1 |
| MYBPC3 | myosin binding protein C, cardiac | Hs00165232_m1 |
| SCGB1C1 | secretoglobin, family 1C, member 1; secretoglobin, | Hs00377337_m1 |
| | family 1C, member 1-like | |
| HSD17B11 | hydroxysteroid (17-beta) dehydrogenase 11 | Hs00212226_m1 |
| SLC33A1 | solute carrier family 33 (acetyl-CoA transporter), | Hs00270469_m1 |
| | member 1 | |
| ABCG2 | ATP-binding cassette, sub-family G (WHITE), member 2 | Hs01053790_m1 |
| HSD17B13 | hydroxysteroid (17-beta) dehydrogenase 13 | Hs00418210_m1 |
| PLCH1 | phospholipase C, eta 1 | Hs00324566_m1 |
| LSP1 | lymphocyte-specific protein 1 | Hs00158885_m1 |
| MBL2 | mannose-binding lectin (protein C) 2, soluble | Hs00175093_m1 |
| CCDC65 | coiled-coil domain containing 65 | Hs00276995_m1 |
| NES | nestin | Hs00707120_s1 |
| MICALL1 | MICAL-like 1 | Hs00411017_m1 |
| WBP2NL | WBP2 N-terminal like | Hs00379258_m1 |
| TRIM48 | tripartite motif-containing 48 | Hs02520296_g1 |
| SH3BGRL3 | SH3 domain binding glutamic acid-rich protein like 3 | Hs00606773_g1 |
| LDLR | low density lipoprotein receptor | Hs00181192_m1 |
| RAB7L1 | RAB7, member RAS oncogene family-like 1 | Hs00187510_m1 |
| WEE1 | WEE1 homolog (S. pombe) | Hs00268721_m1 |

### F. Example 6

### Classification of IBS and Normal Status Using Patterns of Expression in Peripheral Blood

[0247] The results found in Example 5 were then applied to determine the ability of minimal gene sets to classify IBS verse normal status using expression patterns in peripheral blood. All data analysis was performed using R version 2.7.2. Raw data was log transformed to achieve a distribution closer to Gaussian distribution. The 0 value was replaced by 50% of the minimum of detected values for each gene. After removing one sample (#3) due to missing values, a 62-by-28 data matrix was formed. IBS patient samples were combined together as label “1” and healthy volunteers were labeled of “0”. A standard t-test was performed between disease and healthy stages for each gene and the p-value and difference between means are listed in Table 7. Genes were selected based on a combined criteria of p.value <0.01 and abs (difference.mean)>0.5. Prediction was performed in R using 4 different machine learning algorithms were tested to build a model to predict disease stage from healthy stage. Table 9 shows the accuracy of prediction of IBS when different models were established.

TABLE 9
Prediction of IBS by gene expression analysis
using four different prediction models.

| Prediction Models | All genes | Selected genes |
|---|---|---|
| Shrunken Centroid (PAM) | 79% | |
| Random Forest | 80% | 82% |
| Support Vector Machine Model | 74% | 82% |
| Neural Network model | 71% | 77% |

### Shrunken Centroid (PAM) Model

[0248] The Shrunken Centroid (PAM) model was built based on shrunken centroid algorithm implemented in the “pamr” package in R. The model is consisted of 24 genes and the leave-one-out accuracy was 79%.

### Random Forest Model

[0249] The second prediction model we used was based on the random forest algorithm implemented in the “randomForest” package in R. The first model was based on the entire gene set and the second model was based on the 7 genes selected from the t-test. The leave-one-out accuracies of the two models are 80% and 82% respectively.

### Support Vector Machine Model:

[0250] Two models were built based on the support vector machine algorithm implemented in the “svm” package in R. The first model was based on the entire gene set and the second model was based on the 7 genes selected from the t-test. The leave-one-out accuracies of the two models are 74% and 82% respectively.

### Neural Network Model:

[0251] Two models were built based on the neural network algorithm implemented in the “nnet” package in R. The first model was based on the entire gene set and the second model was based on the 7 genes selected from the t-test. The leave-one-out accuracies of the two models are 71% and 77% respectively.

[0252] As shown in Table 10, gene ontology analysis of the 66 DEGs identified in Example 5 reveal that 6 gene ontologies are significantly associated with the DEGs between IBS-D and healthy volunteers, including ribosome, protein biosynthesis, RNA binding, intracellular, signal transduction, and protein binding ontologies. The biological functions of 7 particularly useful genes for the diagnosis and prognosis of IBS are outlined in Table 11.

TABLE 10
Gene ontology enrichment analysis of 66 DEGs. 6 gene ontologies are
significantly associated with the DEGs between IBS-D and healthy volunteers.

| DB_Term | DB_category | p_value | odds_ratio | 95% CI |
|---|---|---|---|---|
| ribosome | cellular_component | 2.70E−07 | 49.52 | 13.31-156.96 |
| protein biosynthesis | biological_process | 2.00E−06 | 32.69 | 8.83-103.07 |
| RNA binding | molecular_function | 5.40E−06 | 18.88 | 5.62-57.69 |
| intracellular | cellular_component | 0.0062 | 4.69 | 1.40-14.27 |
| signal transduction | biological_process | 0.02 | 3.92 | 1.07-12.25 |
| protein binding | molecular_function | 0.021 | 3.33 | 1.10-10.52 |

TABLE 11
Biological functions of selected genes and their biological relevance to IBS.

| Gene | Function | Biological role |
|---|---|---|
| TACR2 (NK2) | receptor for the tachykinin | Mediate pain response, an |
| | neuropeptide substance K (neurokinin | antagonist of this receptor is |
| | A). It is associated with G proteins | under development for treating |
| | that activate a phosphatidylinositol- | IBS, which is in phase II clinical |
| | calcium second messenger system. | trial |
| VIPR1 | receptor for VIP, the activity is | VIP is a gut hormone which has |
| | mediated by G proteins which activate | been reported to be associated |
| | adenylyl cyclase | with IBS |
| MICALL1 | a cytoskeletal regulator, binds to Rab | It participates in the assembly and |
| | 13 | the activity of tight junctions. |
| Rab7L1 | GTP binding protein with GTPase | |
| | activity, involved in protein binding | |
| SH3BGRL | Belongs to the SH3BGR family, binds | |
| | to SH3 domain and has SH3/SH2 | |
| | adaptor activity | |
| GPC 2 | Cell surface proteoglycan that bears | |
| | heparan sulfate, belongs to the | |
| | glypican family | |
| CCDC147 | unknown | unclear |

[0253] Although the foregoing invention has been described in some detail by way of illustration and example for purposes of clarity of understanding, one of skill in the art will appreciate that certain changes and modifications may be practiced within the scope of the appended claims. In addition, each reference provided herein is incorporated by reference in its entirety to the same extent as if each reference was individually incorporated by reference.

The application's sequence listing, which the Patent Office published only in electronic form, follows.

SEQUENCE LISTING (162 sequences)

SEQ ID NO: 1 - DNA, 2078 bp, Homo sapiens
  human forkhead box D3 (FOXD3) cDNA
atgaccctctccggcggcggcagcgccagcgacatgtccggccagacggtgctgacggccgaggacgtggacatcgatgtggtgggcgagggcgacgacgggctggaagagaaggacagcgacgcaggttgcgatagccccgcggggccgccggagctgcgcctggacgaggcggacgaggtgcccccggcggcaccccatcacggacagcctcagccgccccaccagcagcccctgacattgcccaaggaggcggccggagccggggccggaccggggggcgacgtgggcgcgccggaggcggacggctgcaagggcggtgttggcggcgaggagggcggcgcgagcggcggcgggcctggcgcgggcagcggttcggcgggaggcctggccccgagcaagcccaagaacagcctagtgaagccgccttactcgtacatcgcgctcatcaccatggccatcctgcagagcccgcagaagaagctgaccctgagcggcatctgcgagttcatcagcaaccgcttcccctactacagggagaagttccccgcctggcagaacagcatccgccacaacctctcactcaacgactgcttcgtcaagatcccccgcgagccgggcaacccgggcaagggcaactactggaccctggacccgcagtccgaggacatgttcgacaacggcagcttcctgcggcgccggaaacgcttcaagcgccaccagcaggagcacctgcgcgagcagacggcgctcatgatgcagagcttcggcgcttacagcctggcggcggcggccggcgccgcgggaccctacggccgcccctacggcctgcaccctgcggcggcggccggtgcctattcgcacccggcagcggcggcggccgcggctgctgcggcggcgctccagtacccgtacgcgctgccgccggtggcaccggtgctgcctcccgctgtgccgctgctgccctcgggcgagctgggccgcaaagcggccgccttcggctcacagctcggcccgggcctgcagctgcagctcaatagcctgggcgccgccgcggccgctgcgggcacagcgggcgccgcgggcaccaccgcgtcgctcatcaagtccgagccaagcgcgcggccgtcgttcagcatcgagaacatcataggtgggggccccgcggctcctgggggctcggcggtgggcgctggggtcgccggcggcactgggggttcagggggcggcagcacggcgcagtcgtttctgcggccacccgggaccgtgcagtcggcagcgctcatggccacccaccaaccgctgtcgctgagccggacgactgccaccatcgcgcccattcttagcgtgccactctccggacagtttctgcagcccgcagcctcggccgccgccgctgctgcggccgccgctcaagccaaatggccggcgcaatagggacgcgccaatggccgggacccagggtccggcggcggcctcgagcaacaaatgcacctccaggctgcgcgccctgtcccaagcccggtcccggtcccgctgcccaatcctggactctgcctctccccaatttcctttcccctgagcccccaacgcctaccttccgcggcctccatcccctcgcgcacacctaagctggtcgagcaaactcaccgcgcgcccgccggggatagctttccatacaggtaaaaccgaaaaccgaattttccaaaaatgcaccccgacggcgcctgctcttagtaccgtggggatgggagggaaattctttgtatatatttgtaaaaaaattattgactttccttttggggtttttatttttttaagaaaaaacaaattccgtagatttagagctctgaactttcattttttttgaaggttcactctccgaagttttatctgagaaaagaatgtatagagacgttgggagattttaaatataaaaaattttcaaaaaggcaaaaagtgtcattctattataaaagtctgtttatatatgaatgaatatatatggtattctaaatgttattccatcgtgttgtacacaactttgtaaataaatttttaaaatgccaaaaaaaaaa

SEQ ID NO: 2 - DNA, 4185 bp, Homo sapiens
  human phosphatidylinositol 4-kinase type 2 alpha (PI4K2A) cDNA
cggccgcgagcgcagtggtgtggagcgcgccgggtcccggagccggctgtctgagggatggacgagacgagcccactagtgtcccccgagcgggcccaacccccggactacaccttcccgtcgggctcgggcgctcactttccgcaggtgcccgggggcgcggtccgagtggcggcggcggccggctcgggcccctctccgccaggctcgccgggccacgaccgcgagcggcagccactgttggatcgggcccggggcgcggcggcccagggccagacccaaaccgtggcggcgcaggcccaggctctggccgctcaggccgcggcggcagcccacgccgctcaggcccaccgcgagcggaacgagttcccggaggatcctgagttcgaggcggtggtgcggcaggccgagctggccatcgagcgctgcatctttcccgagcgcatctaccagggctccagcggaagctacttcgtcaaggaccctcaggggaggatcattgctgtcttcaaacccaagaatgaagagccctatgggcatcttaatcctaagtggaccaagtggctgcagaagctgtgctgtccttgctgctttggccgtgactgccttgtccttaaccagggctatctctcagaagcaggggccagcctggtggaccaaaaactggaactcaacattgttccccgtacaaaggtagtatacctggccagtgagaccttcaactatagtgccattgaccgagtgaagtccaggggcaagcggcttgcactagagaaagtgccaaaagttggacagcggtttaaccgcatcgggctaccaccaaaggttggttcattccagctctttgttgaaggctacaaagatgcagactattggctgcggcgttttgaagcagaacctcttcctgagaacactaaccggcaactactgctccagtttgagcggttggtggtgctggattacatcatccgcaacactgatcgaggcaatgacaactggctgattaaatatgactgtccaatggatagttctagctctcgggacacagactgggtggtggtgaaggagcctgttatcaaggtggctgccatagacaatgggctggccttcccactgaagcatcctgactcctggagggcatatcctttttactgggcctggttgccccaggcgaaagtcccattttctcaggagatcaaagatctgatccttccaaagatatcggaccctaacttcgtcaaggacttggaagaggacctatatgaactcttcaagaaagatcctggtttcgacaggggccagttccataagcagattgctgtcatgcggggccagatcttaaatctgacccaggccttgaaagacaacaagagtcccctgcacctcgtccagatgccacctgtgattgtcgagacggcccgttcccaccagcggtcttctagcgagtcctacacacagagctttcagagccggaagcccttcttttcatggtggtagctccagaggcaggcagaggaaatattgtcagagactggtgggaggaagcctggggagtggggtgcaggaaaagccagagaagccggtggagagcagcacctttaagagccctctctctctgcttgccaccctgctcagagctttccacccacagggagaagcacaatcaggaacagtgagtgctcctcgcccttctgatgtgggggaggctggagctccatgcacgtagtccagatgcctgggaaggaacatctcccttccagcatctgctggtagcaggctgggacagtcccttccttccctgaaaccctgctctattgcaattccctattatattctgcatcagaaaaacaaacaaaacaaaaacaactttaaatgcttgtagcagaaccccgggtcatctcatgtcagaaacctttaatccaggcctaaatttgcatagacctgacattcagctgccttgcagttgcttcctcccatgagccaaggtggtgtcagagggcaactggatgactcgcagtaccacagcactgggacagacagaagccacacctttcttttgggtttttgccaagcctcctccatctcccatcagtgctgtgggctggctgcaagcctcgaaacagttctcctggaagggaggtttttgctttacccccgccagcacttccgcacacaatcatagagaacctctctgctctctgctggcctacagcttgtctgtttctcaagcagaggcaggaagagctagtcttagcatttatattttaataggaagttgactcccagcatgtaaaagtgatccacgcagccggagtgtatgccgggagctaagtggtctatgggtgaacatatcccaccttgcttcctgagtccttggtcccaatcttctcatttgttcctctcgttttaaattttttccccccaactcttttgatgtaagagttcagtttgtcttcgggagtgggtctctgcaagggctctgggatgagtcttggcttccaagaggacaggctattaggttcttggacttttttctgtgctaccgctgctgcttggtggaagtaacaggacgtggattctgcctcataagtggcagtttcccttttctctctgacttgtcctaggccgatttctctatggcttccctgagaaaggtgaggcccaaaggagagaggccttcaaactgtcccaggtcctgcgcagctcagtgcgtatcttcttgcttccatgtgtcttttcccctgctgcctcactccccacccccacttgccaggtgtttgagccatttctacaccaaagcaaagtacggcctcaggagggagtaaaaagggtgccatctgtgtctggaggggcagctgtgttcatgccctgtgctactggacatttcacaattctggcaccttgcgattggtcagtcaacctcagaaagtaactatcttgaaggtttgaaaaacaaccaaagaaagggagtgaggactatggctgcatgtcctctgcttgcccggctgcagagcagagatgtgcagccctctggtcagctggtccaggctggtccccgccggtccccttccagtccagccaccaagagtccacttgtcccgggcttccacctggctgacaggaagaatttctgagagctggatgtgcatgccctgtggacgaaggtacagctcgcctgcctgccccaatcccagccccgacaatcacatgcagctgactcggacactggccttgggaacaatgttcgagagaacacttgccccttgactgtaggagccagaaggggacccaggtgtgcatagctctctgtagacatttttacccaaacctgttggtaaagtgcccatctggtgctcaagagagcctgggggtctaacagggagcccggctgcctcacctggccacagcctccacaccagatctccacattgtcttgatccagaccagctctgtgatcagaaggaaattgggtccagtgtaggagagagctggtcctgggcctggcaggcaagagtgtgggcatcctttcctggcctttctccactctccctcaagcctgtgctcaggttgccttgaatgtggactctggaagagccaggggcccagaatgccgggggaggcttctgagtggcactcatggaacaccgtccctctgccagccataggccctgcctccagtgtcagggaatggaggctgggctgcgagagtgttgctgccccctgtgtcattcttctaatccaatgtagaaattgtacgtaatgtatttaaatcaacgcaaatgtatgaataacaaatacagttctgaccttttttgtccagtttctttgggggaaggaagacaaagaaggtaggaacggaattttgagggcaaagaaacctgtgtttccatggaattgctgagacgtggctcctggggctatttctccctaataaaggatgatccaggtcctcatttccaaagtcccaatgctctgaaaaccaaaagtattttcataacccatttgaaaccaaacctgacctgaacttacactgataggaagctatgggtaattatgatgtgttccttttagtgtgattctttgttgcagaaatgtcaatatattttatgacatggttccctactagggattatacagtatttgctgactacttcctaagagccaaaaataaaaaatctgaattcc

SEQ ID NO: 3 - DNA, 1030 bp, Homo sapiens
  human microtubule-associated protein 1 light chain 3 alpha (MAP1LC3A), transcript variant 1 cDNA
accgggcgagttacctcccgcagccgcagccgccgtgctcagcgcgagccccggagcccttgagcgcgaggcgcggagcccccggagcccccaaaccgcagacacatccccgcgccccagagccccggcctgcgcgcccagccgggcccgcgcgatgccctcagaccggcctttcaagcagcggcggagcttcgccgaccgctgtaaggaggtacagcagatccgcgaccagcaccccagcaaaatcccggtgatcatcgagcgctacaagggtgagaagcagctgcccgtcctggacaagaccaagtttttggtcccggaccatgtcaacatgagcgagttggtcaagatcatccggcgccgcctgcagctgaaccccacgcaggccttcttcctgctggtgaaccagcacagcatggtgagtgtgtccacgcccatcgcggacatctacgagcaggagaaagacgaggacggcttcctctatatggtctacgcctcccaggaaaccttcggcttctgagccagcagtaggggggctcggcctgggagtcggggggccccggtcaggccctgcccagagagctcctggttcctgaactgagctgcctctaccgtggtgggctgggcaggcatgtgcccccctagtcagagggcaccaacccacctactctgcccctgggtggatcctgggccggtcgtgttagggttgtccctctgggtgctggctggtgggatgggggagggtggggagcagctcccagcacccctgctgtgtggttcatcttttttttaggcccctgcctgtctgcccatctgcccctcacccacccgaggctctgcccaccgcctggacctgcccacccctgaaagactggcccctggctccccgcccctcggtctccacgtggtgtatggatctgtggtcattgtccctctgcagaataaagattgctcaggcctgcctggcaaaaaaaaaaaaaaaaaaaaaaaaaaaaaaaaaaaaaaaaaaaaaaaaaaaaaaaaaaaaaaa

SEQ ID NO: 4 - DNA, 990 bp, Homo sapiens
  human microtubule-associated protein 1 light chain 3 alpha (MAP1LC3A), transcript variant 2 cDNA
ggtgcaaggagaaaggattttgaggaggggactccatggcttccgagttgctgactgaccctccacctcagaggtagttctgacactgtctcagttttgcagatgaagatgagattcttcagttctccatgtggaaaagcagctgtggacccagccgaccgctgtaaggaggtacagcagatccgcgaccagcaccccagcaaaatcccggtgatcatcgagcgctacaagggtgagaagcagctgcccgtcctggacaagaccaagtttttggtcccggaccatgtcaacatgagcgagttggtcaagatcatccggcgccgcctgcagctgaaccccacgcaggccttcttcctgctggtgaaccagcacagcatggtgagtgtgtccacgcccatcgcggacatctacgagcaggagaaagacgaggacggcttcctctatatggtctacgcctcccaggaaaccttcggcttctgagccagcagtaggggggctcggcctgggagtcggggggccccggtcaggccctgcccagagagctcctggttcctgaactgagctgcctctaccgtggtgggctgggcaggcatgtgcccccctagtcagagggcaccaacccacctactctgcccctgggtggatcctgggccggtcgtgttagggttgtccctctgggtgctggctggtgggatgggggagggtggggagcagctcccagcacccctgctgtgtggttcatcttttttttaggcccctgcctgtctgcccatctgcccctcacccacccgaggctctgcccaccgcctggacctgcccacccctgaaagactggcccctggctccccgcccctcggtctccacgtggtgtatggatctgtggtcattgtccctctgcagaataaagattgctcaggcctgcctggcaaaaaaaaaaaaaaaaaaaaaaaaaaaaaaaaaaaaaaaaaaaaaaaaaaaaaaaaaaaaaaa

SEQ ID NO: 5 - DNA, 2988 bp, Homo sapiens
  human acyl-CoA synthetase short-chain family member 2 (ACSS2), transcript variant 1 cDNA
actcccccactcaccaggccccgcccctctacggaggccccgcctctagttcggcctgttttctcagtcccggcacccgccgcgaccgcaaaggcggccgcggttctaggaacttgacgtgatggggcttcctgaggagcgggtccggagcggcagcgggagccggggccaggaggaagctggagccggaggccgggcgcggagttggtctccgccgcccgaggtcagccgctccgcgcacgtcccctcgctgcagcgctaccgcgagctgcaccggcgctccgtggaggagccgcgggaattctggggagacattgccaaggaattttactggaagactccatgccctggcccattccttcggtacaactttgatgtgactaaagggaaaatcttcattgagtggatgaaaggagcaactaccaacatctgctacaatgtactggatcgaaatgtccatgagaaaaagcttggagataaagttgctttttactgggagggcaatgagccaggggagaccactcagatcacataccatcagcttctggtccaagtgtgtcagttcagcaatgttctccgaaaacagggcattcagaagggggaccgagtggccatctacatgcctatgatcccagagcttgtggtggccatgctggcatgtgcccgcattggggctttgcactccattgtgtttgcaggcttctcttcagagtctctatgtgaacggatcttggattccagctgcagtcttctcatcactacagatgccttctacaggggggaaaagcttgtgaacctgaaggagctggctgacgaggccctgcagaagtgtcaggagaagggtttcccagtaagatgctgcattgtggtcaagcacctggggcgggcagagctcggcatgggtgactccaccagccagtcccccccaattaagaggtcatgcccagatgtgcagatctcatggaaccaagggattgacttgtggtggcatgagctcatgcaagaggcaggggatgagtgtgagcccgagtggtgtgatgccgaggacccactcttcatcctgtacaccagtggctccacaggcaaacccaagggtgtggttcacacagttgggggctacatgctctatgtagccacaaccttcaagtatgtgtttgacttccatgcagaggatgtgttctggtgcacggcagacattggttggatcactggtcattcctacgtcacctatgggccactggccaatggtgccaccagtgttttgtttgaggggattcccacatatccggacgtgaaccgcctgtggagcattgtggacaaatacaaggtgaccaagttctacacagcacccacagccatccgtctgctcatgaagtttggagatgagcctgtcaccaagcatagccgggcatccttgcaggtgttaggcacagtgggtgaacccatcaaccctgaggcctggctatggtaccaccgggtggtaggtgcccagcgctgccccatcgtggacaccttctggcaaacagagacaggtggccacatgttgactccccttcctggtgccacacccatgaaacccggttctgctactttcccattctttggtgtagctcctgcaatcctgaatgagtccggggaagagttggaaggtgaagctgaaggttatctggtgttcaagcagccctggccagggatcatgcgcacagtctatgggaaccacgaacgctttgagacaacctactttaagaagtttcctggatactatgttacaggagatggctgccagcgggaccaggatggctattactggatcactggcaggattgatgacatgctcaatgtatctggacacctgctgagtacagcagaggtggagtcagcacttgtggaacatgaggctgttgcagaggcagctgtggtgggccaccctcatcctgtgaagggtgaatgcctctactgctttgtcaccttgtgtgatggccacaccttcagccccaagctcaccgaggagctcaagaagcagattagagaaaagattggccccattgccacaccagactacatccagaatgcacctggcttgcctaaaacccgctcagggaaaatcatgaggcgagtgcttcggaagattgctcagaatgaccatgacctcggggacatgtctactgtggctgacccatctgtcatcagtcacctcttcagccaccgctgcctgaccatccagtgaacatgatcctgacctttacctaggattcctcctgctccaaactttgcccatcctctttgccccctcaggagtgctgagggccagtgttgacccacactaccctcccttgaccagctgtctgggaccggaaaccagctttgtctccaggtagagacaacatcctgtgactgccaggcagaaaggacagggcccaggtcagcctcagtctgctgtgcctccagactgcagagctctcagaacccagaacagagacgaaaaggctacctctcctacccaagttaagtgttcaaaggggatgtgagggcctccactgaagcagggaggcagctgtgtaatcctatgtcagctctcttaggaagccccagtacttatattgggcatgcacttgcccttaaaaacaatgatttgtgagtccaggaacaatttactatttttaaaatattttgctgcttctgttctgggtctgaattcccttttgtgccagatgccagtactgtctgcccattggctccaggggctgtatgggcagattcagtctccagagggtattcagatcatctgcttctttgaaggagtaaatgtgttttgttcctagggccagaggagcttgtcttccttgtcctctgttcccaccctcccctgaacagaacccagcccataagagacattctcagatgaaactctgttttcttgccccagtcaggctcaagccctgtggttgtaggaataaagcctgtgatctcaagaagtggaaaaaaaaa

SEQ ID NO: 6 - DNA, 3027 bp, Homo sapiens
  human acyl-CoA synthetase short-chain family member 2 (ACSS2), transcript variant 2 cDNA
actcccccactcaccaggccccgcccctctacggaggccccgcctctagttcggcctgttttctcagtcccggcacccgccgcgaccgcaaaggcggccgcggttctaggaacttgacgtgatggggcttcctgaggagcgggtccggagcggcagcgggagccggggccaggaggaagctggagccggaggccgggcgcggagttggtctccgccgcccgaggtcagccgctccgcgcacgtcccctcgctgcagcgctaccgcgagctgcaccggcgctccgtggaggagccgcgggaattctggggagacattgccaaggaattttactggaagactccatgccctggcccattccttcggtacaactttgatgtgactaaagggaaaatcttcattgagtggatgaaaggagcaactaccaacatctgctacaatgtactggatcgaaatgtccatgagaaaaagcttggagataaagttgctttttactgggagggcaatgagccaggggagaccactcagatcacataccatcagcttctggtccaagtgtgtcagttcagcaatgttctccgaaaacagggcattcagaagggggaccgagtggccatctacatgcctatgatcccagagcttgtggtggccatgctggcatgtgcccgcattggggctttgcactccattgtgtttgcaggcttctcttcagagtctctatgtgaacggatcttggattccagctgcagtcttctcatcactacagatgccttctacaggggggaaaagcttgtgaacctgaaggagctggctgacgaggccctgcagaagtgtcaggagaagggtttcccagtaagatgctgcattgtggtcaagcacctggggcgggcagagctcggcatgggtgactccaccagccagtcccccccaattaagaggtcatgcccagatgtgcagggtaaactgaaagagaaatccaagcgtgttcagccccagatctcatggaaccaagggattgacttgtggtggcatgagctcatgcaagaggcaggggatgagtgtgagcccgagtggtgtgatgccgaggacccactcttcatcctgtacaccagtggctccacaggcaaacccaagggtgtggttcacacagttgggggctacatgctctatgtagccacaaccttcaagtatgtgtttgacttccatgcagaggatgtgttctggtgcacggcagacattggttggatcactggtcattcctacgtcacctatgggccactggccaatggtgccaccagtgttttgtttgaggggattcccacatatccggacgtgaaccgcctgtggagcattgtggacaaatacaaggtgaccaagttctacacagcacccacagccatccgtctgctcatgaagtttggagatgagcctgtcaccaagcatagccgggcatccttgcaggtgttaggcacagtgggtgaacccatcaaccctgaggcctggctatggtaccaccgggtggtaggtgcccagcgctgccccatcgtggacaccttctggcaaacagagacaggtggccacatgttgactccccttcctggtgccacacccatgaaacccggttctgctactttcccattctttggtgtagctcctgcaatcctgaatgagtccggggaagagttggaaggtgaagctgaaggttatctggtgttcaagcagccctggccagggatcatgcgcacagtctatgggaaccacgaacgctttgagacaacctactttaagaagtttcctggatactatgttacaggagatggctgccagcgggaccaggatggctattactggatcactggcaggattgatgacatgctcaatgtatctggacacctgctgagtacagcagaggtggagtcagcacttgtggaacatgaggctgttgcagaggcagctgtggtgggccaccctcatcctgtgaagggtgaatgcctctactgctttgtcaccttgtgtgatggccacaccttcagccccaagctcaccgaggagctcaagaagcagattagagaaaagattggccccattgccacaccagactacatccagaatgcacctggcttgcctaaaacccgctcagggaaaatcatgaggcgagtgcttcggaagattgctcagaatgaccatgacctcggggacatgtctactgtggctgacccatctgtcatcagtcacctcttcagccaccgctgcctgaccatccagtgaacatgatcctgacctttacctaggattcctcctgctccaaactttgcccatcctctttgccccctcaggagtgctgagggccagtgttgacccacactaccctcccttgaccagctgtctgggaccggaaaccagctttgtctccaggtagagacaacatcctgtgactgccaggcagaaaggacagggcccaggtcagcctcagtctgctgtgcctccagactgcagagctctcagaacccagaacagagacgaaaaggctacctctcctacccaagttaagtgttcaaaggggatgtgagggcctccactgaagcagggaggcagctgtgtaatcctatgtcagctctcttaggaagccccagtacttatattgggcatgcacttgcccttaaaaacaatgatttgtgagtccaggaacaatttactatttttaaaatattttgctgcttctgttctgggtctgaattcccttttgtgccagatgccagtactgtctgcccattggctccaggggctgtatgggcagattcagtctccagagggtattcagatcatctgcttctttgaaggagtaaatgtgttttgttcctagggccagaggagcttgtcttccttgtcctctgttcccaccctcccctgaacagaacccagcccataagagacattctcagatgaaactctgttttcttgccccagtcaggctcaagccctgtggttgtaggaataaagcctgtgatctcaagaagtggaaaaaaaaa

SEQ ID NO: 7 - DNA, 584 bp, Homo sapiens
  human agouti signaling protein (ASIP) precursor, nonagouti homolog (mouse) cDNA
gcctcctgggatggatgtcacccgcttactcctggccaccctgctggtcttcctctgcttcttcactgccaacagccacctgccacctgaggagaagctccgagatgacaggagcctgagaagcaactcctctgtgaacctactggatgtcccttctgtctctattgtggcgctgaacaagaaatccaaacagatcggcagaaaagcagcagaaaagaaaagatcttctaagaaggaggcttcgatgaagaaagtggtgcggccccggacccccctatctgcgccctgcgtggccacccgcaacagctgcaagccgccggcacccgcctgctgcgacccgtgcgcctcctgccagtgccgcttcttccgcagcgcctgctcctgccgcgtgctcagcctcaactgctgagcgcccccactcccggccgcgagcaggcagggcttcggggacgcggggcgcttctcgggcgggtgatccctaacagggcggcttcccagggctgcaggcgggcggaggttccaggagatgggacttcagggagacctggcttgggctaaaatcgaaatacaatatatataggctg

SEQ ID NO: 8 - DNA, 939 bp, Homo sapiens
  human olfactory receptor, family 2, subfamily L, member 8 (OR2L8) cDNA
atggaaaattacaatcaaacatcaactgatttcatcttattggggctgtttccaccatcaagaattgaccttttcttcttcattctcattgttttcattttcctgatggctctaattggaaacctgtccatgattcttctcatcttcttggacacccatctccacacacccatgtatttcctactgagtcagctctccctcattgacctaaattacatctccaccattgttcctaagatggcatctgattttctgcatggaaacaagtctatctccttcactgggtgtgggattcagagtttcttcttcttggcattaggaggtgcagaagcactacttttggcatctatggcctatgatcgttacattgctatttgctttcctctccactatctcatccgcatgagcaaaagagtgtgtgtgctgatgataacagggtcttggatcataggctcgatcaatgcttgtgctcacactgtatatgtactccatattccttattgccgatccagggccatcaatcatttcttctgtgatgtcccagcaatggtgactctggcctgcatggacacctgggtctatgagggcacagtgtttttgagtgccaccatctttctcgtgtttcccttcattggtatttcatgttcctatggccaggttctctttgctgtctaccacatgaaatctgcagaagggaggaagaaagcctatttgacctgcagcacccacctcactgtagtaactttctactatgcaccttttgtctacacttatctacgtccaagatccctgcgatctccaacagaggacaaggttctggctgtcttctacaccatcctcaccccaatgctcaaccccatcatctatagcctgaggaacaaggaggtgatgggggccctgacacgagtgagtcagagaatctgctctgtgaaaatgtag

SEQ ID NO: 9 - DNA, 2855 bp, Homo sapiens
  human lysophosphatidic acid receptor 5 (LPAR5), transcript variant 1 cDNA
agtccgtgaaggcctctgagggcaatgcttcctcttcactctctccttggcccgtgtggggttgggtgagtgcactgagctgggagggatgggctgagatctgctgaggtgggtgtgtcccctcccgccctgggagcaggtcctaccagcccagcccagcccagcccagcccagagcaggcagcggaagccagcttggggcagcgcagagcaacacggagcacaggtctctgctgctgatgaagctgtgaccaaacgcacccaacccttggcagccatctgtccctgcagccatagcccacattcccatgacctccctctgcttgttttgggaccatgtctgtacagcctctaggccccagccccggaggtgaatgccatgccatgattctggtgtgctccatggcatccccagcctagctcccaatcccactttggcacgatgttagccaacagctcctcaaccaacagttctgttctcccgtgtcctgactaccgacctacccaccgcctgcacttggtggtctacagcttggtgctggctgccgggctccccctcaacgcgctagccctctgggtcttcctgcgcgcgctgcgcgtgcactcggtggtgagcgtgtacatgtgtaacctggcggccagcgacctgctcttcaccctctcgctgcccgttcgtctctcctactacgcactgcaccactggcccttccccgacctcctgtgccagacgacgggcgccatcttccagatgaacatgtacggcagctgcatcttcctgatgctcatcaacgtggaccgctacgccgccatcgtgcacccgctgcgactgcgccacctgcggcggccccgcgtggcgcggctgctctgcctgggcgtgtgggcgctcatcctggtgtttgccgtgcccgccgcccgcgtgcacaggccctcgcgttgccgctaccgggacctcgaggtgcgcctatgcttcgagagcttcagcgacgagctgtggaaaggcaggctgctgcccctcgtgctgctggccgaggcgctgggcttcctgctgcccctggcggcggtggtctactcgtcgggccgagtcttctggacgctggcgcgccccgacgccacgcagagccagcggcggcggaagaccgtgcgcctcctgctggctaacctcgtcatcttcctgctgtgcttcgtgccctacaacagcacgctggcggtctacgggctgctgcggagcaagctggtggcggccagcgtgcctgcccgcgatcgcgtgcgcggggtgctgatggtgatggtgctgctggccggcgccaactgcgtgctggacccgctggtgtactactttagcgccgagggcttccgcaacaccctgcgcggcctgggcactccgcaccgggccaggacctcggccaccaacgggacgcgggcggcgctcgcgcaatccgaaaggtccgccgtcaccaccgacgccaccaggccggatgccgccagtcaggggctgctccgaccctccgactcccactctctgtcttccttcacacagtgtccccaggattccgccctctgaacacacatgccattgcgctgtccgtgcccgactcccaacgcctctcgttctgggaggcttacagggtgtacacacaagaaggtgggctgggcacttggacctttgggtggcaattccagcttagcaacgcagaagagtacaaagtgtggaagccagggcccagggaaggcagtgctgctggaaatggcttctttaaactgtgagcacgcagagcaccccttctccagcggtgggaagtgatgcagagagcccacccgtgcagagggcagaagaggacgaaatgcctttgggtgggcagggcattaaactgctaaaagctggttagatggaacagaaaatgggcattctggatctaaaccgccacaggggcctgagagctgaagagcaccaggtttggtggacaaagctactgagatgcctgttcatctgctgacttctgtctaggctcatggatgccaccccctttcatttcggcctaggcttcccctgctcaccactgaggcctaatacaagagttcctatggacagaactacattctttctcgcatagtgacttgtgacaatttagacttggcatccagcatgggatagttggggcaaggcaaaactaacttagagtttccccctcaacaacatccaagtccaaaccctttttaggttatcctttcttccatcacatccccttttccaggcctcctccattttaggtccttaatattctttctttttctctctctctcgtttctctcttctctctcctctcctctcctctctcttctcctcttctctctctctccctctctctcctttgtccagagtaaggataaaattctttctactaaagcactggttctcaaactttttggtctcagaccccactcttagaaattgaggatctcaaagagctttgcttatattttgttcttttgatacttaccatactagaaattaaagcgaatacatttttaaaataaatacacatgcacacattacattagccatgggagcaataatgtcaccacacacacttcatgaagcctctggaaaactctacagtatacttgtgagagaatgagagtgaaagggacaaataacatctgtgtagcagtattatgaaaatagcttgacctcgtggacttcctcagagggttggtccctggatcacactttgagaaccatacttgtcctgaagtattggagttcatgtctaacttcttcccagggcattatgtacagtgctttttattactgtggggagagggcagtgctaaataaattaatcactactgatagtc

SEQ ID NO: 10 - DNA, 2695 bp, Homo sapiens
  human lysophosphatidic acid receptor 5 (LPAR5), transcript variant 2 cDNA
agcaaagagcagtgcccagcccagctcagagggcaaatgggacagatcccagaggccctgaggaggtctctgctgctgatgaagctgtgaccaaacgcacccaacccttggcagccatctgtccctgcagccatagcccacattcccatgacctccctctgcttgttttgggaccatgtctgtacagcctctaggccccagccccggaggtgaatgccatgccatgattctggtgtgctccatggcatccccagcctagctcccaatcccactttggcacgatgttagccaacagctcctcaaccaacagttctgttctcccgtgtcctgactaccgacctacccaccgcctgcacttggtggtctacagcttggtgctggctgccgggctccccctcaacgcgctagccctctgggtcttcctgcgcgcgctgcgcgtgcactcggtggtgagcgtgtacatgtgtaacctggcggccagcgacctgctcttcaccctctcgctgcccgttcgtctctcctactacgcactgcaccactggcccttccccgacctcctgtgccagacgacgggcgccatcttccagatgaacatgtacggcagctgcatcttcctgatgctcatcaacgtggaccgctacgccgccatcgtgcacccgctgcgactgcgccacctgcggcggccccgcgtggcgcggctgctctgcctgggcgtgtgggcgctcatcctggtgtttgccgtgcccgccgcccgcgtgcacaggccctcgcgttgccgctaccgggacctcgaggtgcgcctatgcttcgagagcttcagcgacgagctgtggaaaggcaggctgctgcccctcgtgctgctggccgaggcgctgggcttcctgctgcccctggcggcggtggtctactcgtcgggccgagtcttctggacgctggcgcgccccgacgccacgcagagccagcggcggcggaagaccgtgcgcctcctgctggctaacctcgtcatcttcctgctgtgcttcgtgccctacaacagcacgctggcggtctacgggctgctgcggagcaagctggtggcggccagcgtgcctgcccgcgatcgcgtgcgcggggtgctgatggtgatggtgctgctggccggcgccaactgcgtgctggacccgctggtgtactactttagcgccgagggcttccgcaacaccctgcgcggcctgggcactccgcaccgggccaggacctcggccaccaacgggacgcgggcggcgctcgcgcaatccgaaaggtccgccgtcaccaccgacgccaccaggccggatgccgccagtcaggggctgctccgaccctccgactcccactctctgtcttccttcacacagtgtccccaggattccgccctctgaacacacatgccattgcgctgtccgtgcccgactcccaacgcctctcgttctgggaggcttacagggtgtacacacaagaaggtgggctgggcacttggacctttgggtggcaattccagcttagcaacgcagaagagtacaaagtgtggaagccagggcccagggaaggcagtgctgctggaaatggcttctttaaactgtgagcacgcagagcaccccttctccagcggtgggaagtgatgcagagagcccacccgtgcagagggcagaagaggacgaaatgcctttgggtgggcagggcattaaactgctaaaagctggttagatggaacagaaaatgggcattctggatctaaaccgccacaggggcctgagagctgaagagcaccaggtttggtggacaaagctactgagatgcctgttcatctgctgacttctgtctaggctcatggatgccaccccctttcatttcggcctaggcttcccctgctcaccactgaggcctaatacaagagttcctatggacagaactacattctttctcgcatagtgacttgtgacaatttagacttggcatccagcatgggatagttggggcaaggcaaaactaacttagagtttccccctcaacaacatccaagtccaaaccctttttaggttatcctttcttccatcacatccccttttccaggcctcctccattttaggtccttaatattctttctttttctctctctctcgtttctctcttctctctcctctcctctcctctctcttctcctcttctctctctctccctctctctcctttgtccagagtaaggataaaattctttctactaaagcactggttctcaaactttttggtctcagaccccactcttagaaattgaggatctcaaagagctttgcttatattttgttcttttgatacttaccatactagaaattaaagcgaatacatttttaaaataaatacacatgcacacattacattagccatgggagcaataatgtcaccacacacacttcatgaagcctctggaaaactctacagtatacttgtgagagaatgagagtgaaagggacaaataacatctgtgtagcagtattatgaaaatagcttgacctcgtggacttcctcagagggttggtccctggatcacactttgagaaccatacttgtcctgaagtattggagttcatgtctaacttcttcccagggcattatgtacagtgctttttattactgtggggagagggcagtgctaaataaattaatcactactgatagtc

SEQ ID NO: 11 - DNA, 6393 bp, Homo sapiens
  human lysine (K)-specific demethylase 5B (KDM5B), jumonji, AT rich interactive domain 1B, jumonji/ARID domain-containing protein 1B (JARID1B) cDNA
gtacaactcggacttgctgttgctcgagccgcgtctgcacgggtctcggaccgagcggagctcgcagcctcggtcccggagcccaccttcgcctcgcccttgcccagcctgcggtgatggaggcggccaccacactgcacccaggcccgcgcccggcgctgcccctcgggggcccgggcccgctgggcgagttcctgcctccacccgagtgcccggtcttcgaacccagctgggaagagttcgcggaccccttcgctttcatccacaagatccggcccatagccgagcagactggcatctgtaaggtgcggccgccgccggattggcagccaccatttgcatgtgatgttgataaacttcattttacgccacgtatccagagactgaatgaattggaggcccaaactcgtgtaaaattgaatttcttggaccagattgcaaagtactgggagttacagggaagtactctgaaaattccacatgtggagaggaagatcttggacttatttcagcttaataagttagttgcagaagaaggtggatttgcagttgtttgcaaggatagaaaatggaccaaaattgctaccaagatggggtttgctcctggcaaagcagtgggctcacatatcagagggcattatgaacgaattctcaacccctacaacttattcctgtccggagacagcctaaggtgtttgcagaagccaaacctgaccacagacactaaggacaaggagtacaaaccccatgatattccccagaggcagtctgtgcagccttcggaaacgtgccccccagcccgacgagcaaaacgcatgagagcagaggccatgaatattaaaatagaacccgaggagacaacggaagccagaactcataatctgagacgtcgaatgggttgtccaactccaaaatgtgaaaatgagaaagaaatgaagagtagcatcaagcaagaacctattgagaggaaagattatattgtagaaaatgagaaggaaaagcccaagagtcgatctaaaaaagccaccaatgctgtggacctgtatgtctgtcttttatgtggcagtggcaatgatgaagaccggctactgttgtgtgatggctgtgatgacagttaccataccttttgcttgatcccacctctccatgatgttcccaagggagactggaggtgtcctaagtgtttggctcaggaatgtagtaagccacaagaagcatttggctttgaacaagcagccagggactataccctccgtacttttggggaaatggcagatgcgttcaaatctgattacttcaacatgccagtccatatggtccccacagagcttgttgagaaagaattttggagactagtaagcactattgaggaggatgtcacagtggaatatggagctgacattgcctcaaaggaatttggcagtggctttcctgtccgagatgggaaaatcaaactctcacctgaggaagaggagtatcttgatagtggctggaatttgaacaacatgccagtgatggagcagtctgtccttgcacatattactgctgatatatgtggcatgaaacttccttggttgtatgtgggaatgtgcttttcttcattctgttggcacattgaagaccactggagctattcaattaactacttgcactggggtgagccaaaaacctggtatggagtcccagggtatgctgctgagcagctagaaaatgtaatgaagaaactagctccagaactctttgtgtcccagccggatctcctccatcagcttgtgaccatcatgaaccccaataccctgatgactcatgaagtgcctgtttaccgaactaatcagtgtgctggggagtttgtgattacatttccaagagcctaccacagtggttttaaccagggttttaattttgctgaggctgttaacttctgcactgttgattggctgccattaggccgacagtgtgtggagcattatcgcttgcttcatcgatattgtgtgttttcccacgatgagatgatctgcaagatggcttccaaggctgatgtattagatgttgtagtggcttcaactgttcagaaagacatggccattatgattgaggatgagaaagctttaagagaaactgtccgtaaattgggagtgattgattcggaaagaatggattttgagctgttgccagatgatgaacgtcagtgtgtaaaatgcaaaactacatgcttcatgtctgccatctcctgttcttgtaaacctggccttcttgtttgcctgcatcatgtaaaagaattgtgttcctgtcctccttacaaatataaattgcggtataggtacacgctggatgatctctaccctatgatgaatgcattgaagcttcgagcagaatcttacaacgaatgggccttgaatgtgaatgaagctttggaggcaaagatcaacaagaagaaaagccttgtcagcttcaaggctttaattgaagaatctgaaatgaagaaattcccagacaatgatcttttgcgacaccttcgcctagtcacacaggatgcagagaagtgtgcctctgttgcgcagcagttgcttaatggcaaaaggcaaactagatatcgatctggtggagggaaatcccaaaatcagttgacagtgaatgagctccggcagtttgtaacacagctgtatgctcttccatgtgtcctcagtcagacaccattactaaaggatctcttgaatcgtgtagaagattttcaacagcatagtcagaaactactctctgaggaaacgcctagtgctgcggagctgcaggacttgctagatgtcagctttgaatttgatgttgaacttccacagcttgctgagatgcgtatccgtttggaacaagcccgttggctagaagaggtgcagcaagcttgcctagaccccagctcccttactttagatgatatgagacgtctcatagacctaggggtagggctggccccgtattcagcagtggagaaagctatggcccggctgcaggaactgctcacagtgtcagagcactgggacgacaaagccaagagtctcctcaaggccaggccacgacattcattgaatagccttgctacggcagtaaaggaaatcgaagagatccctgcatatctgcccaatggtgcggctctgaaagactcagtgcagagagccagagactggcttcaggatgtagagggcctgcaggctggaggacgtgtgccagtgttagacacactcatagaacttgttacacgaggccgatctatccccgtacatctgaattctttgccaagactggaaaccctagtagctgaggttcaggcttggaaagaatgtgctgttaatacattcttgactgagaattctccatattctctcttagaggtgctgtgtcctcgatgtgatattggccttttgggattgaaaaggaagcagagaaagttaaaggagcccttgccaaatggaaagaaaaaaagcaccaaattagagagtctgagtgacctggagagagctttaactgaaagcaaggagactgcttcagctatggcaactcttggggaagctcgcctaagggaaatggaagccttgcagtctctcagactcgccaatgaagggaaattgctgtcgcctctccaagatgtggatataaaaatctgcctatgtcagaaggccccagctgcccctatgattcaatgtgaactctgcagggatgctttccacaccagttgtgtggcggtacccagtatttcacagggcctgcgaatctggctttgtccccattgtcggaggtcagagaaacctccattagagaaaattctgcccctgctcgcctcccttcagcgtatccgagttcgccttcctgagggagatgcacttcgatatatgattgaaagaaccgtgaactggcagcacagagcccagcaactgctttcgtcagggaatcttaaatttgtgcaagatcgagtgggctcaggactgttatatagcagatggcaagcctcagcaggacaggtgtcagacacaaacaaggtatctcaacctcctggcacaacatcattttctttgcctgatgactgggacaacagaacctcatatttgcactcccccttctcaactggacgaagttgtatccccctccatggtgttagtccagaagtgaatgaactattgatggaagcccagctgctccaggtatcccttcctgaaattcaggaactttaccagactttacttgcaaagccaagccctgctcagcagactgaccgaagctcaccagtgagacccagcagtgagaagaatgactgttgccgagggaagcgagatggaattaacagtcttgagagaaaactgaagagacgcctggaaagagagggcctctccagtgagcggtgggaacgagttaagaaaatgcggacccccaaaaagaagaaaatcaaactgagccaccccaaggacatgaacaatttcaagttagagagagagcgtagctatgaattagttcgttctgctgaaactcattccctgccctcagacacatcctattccgaacaggaagactctgaggatgaagatgccatctgcccagctgtgagctgcctgcagccagaaggagatgaggtggactgggtccagtgtgatggcagctgcaatcagtggtttcatcaggtctgtgttggtgtctccccagagatggcagagaaagaagactacatctgtgtgcgctgtactgtgaaggacgcaccaagccgaaagtaaaaacacaaaaacagatacccccctacttaatgtaattcaggactccaaccaagaggatttcttcaaatctcagcaaagctacaggactggtactcaagccagcctgtaaacggtgctatttctattccttatgggatcatttttccaggactctttgaagaaaagaaaaaacaactaaaaaaatttttgacactttttgtattttttccttaagagctatttgtggttgttgaggtttgaaaagctgactgttttttttgcaggggttcccaccaatttggaaggcattgaagcttgcaccttttcatgtacagcattaaaattttacctctctctgggatttaccagcttaagagtccaactcacttccagtgcccaaaagggcacccaccagaaattccagtaaatcctcatttgaggaagctctcccttgtttactctgttaccacattggggaaatttttaagtttttcactttgggagtttttgtttgtttcttcttttcctttatccacttttcttcttcctggtagactaggtttatttatctgagcaataacttctatgttggtttcagtggctggaattaaaacaaaacaaaacaaacttccaaacagtgtgttggtgctttagcgattgattgatgtacagaacacaaatgtctagtttctagtgtcactgatgaactagtgatgtagaaaagagacttctctgtaagtaattgccacagctgtattttggctttctccctgtcccttcctttctcccctattttttggtagcttgtatcaaatgttacagtttatattgtggaataaatccttcgtcctaacataacactaaatgctgattatttagagccattagagcacagcttcttctgcccctctactgttgcacagccagaaggggctgcttgcttttgcctctgcccaaccaggttgcagtagcagtggatgttagcctgcaaacaacattaggggattcttcttttgtgtcctgctctgtttggtgggccatatgcctacagccctcactaacaaagaacccctctgtcttcaaggactagaacctatctttaaagccgtgctcttttaaaataagctttctcagaatgttggcaaatcacttcaatcctcaaatcagtcttccttgtggaatgctgcctttattatatttgaattgacaggggaacttggtttagggttaagacgttggaaggaaatctaaggaaaattaatcctcacagaggtccgggtttagtatatgtcttgagaggagacttgtgaattcccagactctgcctcctggtttcctttctcatttctttctaactgtagctatcattactggctgtggatagcccatagctattttccttgcttttcttttttaaaggggtctgttctgcagtggagaagacattctggtgaccagacttttgcttaccttttcctattctgttgccaatttttgttttccccacattctatagccataaacctgaagatgagtaaaactggtgggtctttaataaaacaacaacaaaaacagcagtttgtgatatagcagaggtttaaatgtaccctccccttttatgcacttcaaataattaaatctctttaagaatgaaaaaaaaaaa

SEQ ID NO: 12 - DNA, 1943 bp, Homo sapiens
  human cyclin-dependent kinase inhibitor 1C (p57, Kip2) (CDKN1C), transcript variant 1 cDNA
agtgcgctgtgctcgaggggtgccggccaggcctgagcgagcgagctagccagcaggcatcgagggggcgcggctgccgtccggacgagacaggcgaacccgacgcagaagagtccaccaccggacagccaggtagccgccgcgtccctcgcacacgcagagtcgggcggcgcggggtctcccttgcgcccggcctccgccctctcctcctctcctttccccttcttctcgctgtcctctcctctctcgctgcccgcgtttgcgcagccccgggccatgtccgacgcgtccctccgcagcacatccacgatggagcgtcttgtcgcccgtgggaccttcccagtactagtgcgcaccagcgcctgccgcagcctcttcgggccggtggaccacgaggagctgagccgcgagctgcaggcccgcctggccgagctgaacgccgaggaccagaaccgctgggattacgacttccagcaggacatgccgctgcggggccctggacgcctgcagtggaccgaagtggacagcgactcggtgcccgcgttctaccgcgagacggtgcaggtggggcgctgccgcctgctgctggcgccgcggcccgtcgcggtcgcggtggctgtcagcccgcccctcgagccggccgctgagtccctcgacggcctcgaggaggcgccggagcagctgcctagtgtcccggtcccggccccggcgtccaccccgcccccagtcccggtcctggctccagccccggccccggctccggctccggtcgcggctccggtcgcggctccggtcgcggtcgcggtcctggccccggccccggccccggctccggctccggctccggccccggctccagtcgcggccccggccccagccccggccccggccccggccccggcccccgccccggccccggccccggacgcggcgcctcaagagagcgccgagcagggcgcgaaccaggggcagcgcggccaggagcctctcgctgaccagctgcactcggggatttcgggacgtcccgcggccggcaccgcggccgccagcgccaacggcgcggcgatcaagaagctgtccgggcctctgatctccgatttcttcgccaagcgcaagagatcagcgcctgagaagtcgtcgggcgatgtccccgcgccgtgtccctctccaagcgccgcccctggcgtgggctcggtggagcagaccccgcgcaagaggctgcggtgagccaatttagagcccaaagagccccgagggaacctgccggggcagcggacgttggaagggcgctgggcctcggctgggaccgttcatgtagcagcaaccggcggcggctgccgcagagcagcgttcggttttgtttttaaattttgaaaactgtgcaatgtattaataacgtctttttatatctaaatgtattctgcacgagaaggtacactggtcccaaggtgtaaagctttaagagtcatttatataaaatgtttaatctctgctgaaactcagtgcaaaaaaaagaaaaaagaaaaaaaaaaggaaaaaataaaaaaaccatgtatatttgtacaaaaagtttttaaagttatactaacttatattttctatttatgtccaggcgtggaccgctctgccacgcactagctcggttattggttatgccaaaggcactctccatctcccacatctggttattgacaagtgtaactttattttcatcgcggactctggggaagggggtcactcacaagctgtagctgccatacatgcccatctagcttgcagtctcttcgcgctttcgctgtctctcttattatgactgtgtttatctgaaacttgaagacaagtctgttaaaatggttcctgagccgtctgtaccactgccccggcccctcgtccgccgggttctaaataaagaggccgaaaaatgctgcaaaaaaaaaaaaaaa

SEQ ID NO: 13 - DNA, 1776 bp, Homo sapiens
  human cyclin-dependent kinase inhibitor 1C (p57, Kip2) (CDKN1C), transcript variant 2 cDNA
agtgcgctgtgctcgaggggtgccggccaggcctgagcgagcgagctagccagcaggcatcgagggggcgcggctgccgtccggacgagacaggcgaacccgacgcagaagagtccaccaccggacagccagcacatccacgatggagcgtcttgtcgcccgtgggaccttcccagtactagtgcgcaccagcgcctgccgcagcctcttcgggccggtggaccacgaggagctgagccgcgagctgcaggcccgcctggccgagctgaacgccgaggaccagaaccgctgggattacgacttccagcaggacatgccgctgcggggccctggacgcctgcagtggaccgaagtggacagcgactcggtgcccgcgttctaccgcgagacggtgcaggtggggcgctgccgcctgctgctggcgccgcggcccgtcgcggtcgcggtggctgtcagcccgcccctcgagccggccgctgagtccctcgacggcctcgaggaggcgccggagcagctgcctagtgtcccggtcccggccccggcgtccaccccgcccccagtcccggtcctggctccagccccggccccggctccggctccggtcgcggctccggtcgcggctccggtcgcggtcgcggtcctggccccggccccggccccggctccggctccggctccggccccggctccagtcgcggccccggccccagccccggccccggccccggccccggcccccgccccggccccggccccggacgcggcgcctcaagagagcgccgagcagggcgcgaaccaggggcagcgcggccaggagcctctcgctgaccagctgcactcggggatttcgggacgtcccgcggccggcaccgcggccgccagcgccaacggcgcggcgatcaagaagctgtccgggcctctgatctccgatttcttcgccaagcgcaagagatcagcgcctgagaagtcgtcgggcgatgtccccgcgccgtgtccctctccaagcgccgcccctggcgtgggctcggtggagcagaccccgcgcaagaggctgcggtgagccaatttagagcccaaagagccccgagggaacctgccggggcagcggacgttggaagggcgctgggcctcggctgggaccgttcatgtagcagcaaccggcggcggctgccgcagagcagcgttcggttttgtttttaaattttgaaaactgtgcaatgtattaataacgtctttttatatctaaatgtattctgcacgagaaggtacactggtcccaaggtgtaaagctttaagagtcatttatataaaatgtttaatctctgctgaaactcagtgcaaaaaaaagaaaaaagaaaaaaaaaaggaaaaaataaaaaaaccatgtatatttgtacaaaaagtttttaaagttatactaacttatattttctatttatgtccaggcgtggaccgctctgccacgcactagctcggttattggttatgccaaaggcactctccatctcccacatctggttattgacaagtgtaactttattttcatcgcggactctggggaagggggtcactcacaagctgtagctgccatacatgcccatctagcttgcagtctcttcgcgctttcgctgtctctcttattatgactgtgtttatctgaaacttgaagacaagtctgttaaaatggttcctgagccgtctgtaccactgccccggcccctcgtccgccgggttctaaataaagaggccgaaaaatgctgcaaaaaaaaaaaaaaa

SEQ ID NO: 14 - DNA, 1771 bp, Homo sapiens
  human cyclin-dependent kinase inhibitor 1C (p57, Kip2) (CDKN1C), transcript variant 3 cDNA
agtgcgctgtgctcgaggggtgccggccaggcctgagcgagcgagctagccagcaggcatcgagggggcgcggctgccgtccggacgagacaggcgaacccgacgcagaagagtccaccaccggacagccagcacatccacgatggagcgtcttgtcgcccgtgggaccttcccagtactagtgcgcaccagcgcctgccgcagcctcttcgggccggtggaccacgaggagctgagccgcgagctgcaggcccgcctggccgagctgaacgccgaggaccagaaccgctgggattacgacttccagcaggacatgccgctgcggggccctggacgcctgcagtggaccgaagtggacagcgactcggtgcccgcgttctaccgcgagacggtgcaggtggggcgctgccgcctgctgctggcgccgcggcccgtcgcggtcgcggtggctgtcagcccgcccctcgagccggccgctgagtccctcgacggcctcgaggaggcgccggagcagctgcctagtgtcccggtcccggccccggcgtccaccccgcccccagtcccggtcctggctccagccccggccccggctccggctccggtcgcggctccggtcgcggctccggtcgcggtcgcggtcctggccccggccccggccccggctccggctccggctccggccccggctccagtcgcggccccggccccagccccggccccggccccggccccggcccccgccccggccccggccccggacgcggcgcctcaagagagcgccgagcagggcgcgaaccaggggcagcgcggccaggagcctctcgctgaccagctgcactcggggatttcgggacgtcccgcggccggcaccgcggccgccagcgccaacggcgcggcgatcaagaagctgtccgggcctctgatctccgatttcttcgccaagcgcaagagatcagcgcctgagaagtcgtcgggcgatgtccccgcgccgtgtccctctccaagcgccgcccctggcgtgggctcggtggagcagaccccgcgcaagaggctgcggtgagccaaagcccaaagagccccgagggaacctgccggggcagcggacgttggaagggcgctgggcctcggctgggaccgttcatgtagcagcaaccggcggcggctgccgcagagcagcgttcggttttgtttttaaattttgaaaactgtgcaatgtattaataacgtctttttatatctaaatgtattctgcacgagaaggtacactggtcccaaggtgtaaagctttaagagtcatttatataaaatgtttaatctctgctgaaactcagtgcaaaaaaaagaaaaaagaaaaaaaaaaggaaaaaataaaaaaaccatgtatatttgtacaaaaagtttttaaagttatactaacttatattttctatttatgtccaggcgtggaccgctctgccacgcactagctcggttattggttatgccaaaggcactctccatctcccacatctggttattgacaagtgtaactttattttcatcgcggactctggggaagggggtcactcacaagctgtagctgccatacatgcccatctagcttgcagtctcttcgcgctttcgctgtctctcttattatgactgtgtttatctgaaacttgaagacaagtctgttaaaatggttcctgagccgtctgtaccactgccccggcccctcgtccgccgggttctaaataaagaggccgaaaaatgctgcaaaaaaaaaaaaaaa

SEQ ID NO: 15 - DNA, 1425 bp, Homo sapiens
  human preferentially expressed antigen in melanoma (PRAME) family member 7 (PRAMEF7) cDNA
atgagcatcagggccccacccagactcctggagctggcaaggcagaggctgctgagggaccaggccttggccatctccaccatggaggagctgcccagggagctcttccccacactgttcatggaggccttcagcaggagacgctgtgaaaccctgaaaacaatggtgcaggcctggcctttcacccgcctccctctagggtccctgatgaagtcgcctcatctggagtcattaaaatctgtgctggaaggggttgatgtgctgttgacccaagaggttcgccccaggcagtcaaaacttcaagtgctggacttgaggaatgtggatgagaacttctgcgacatattttctggagctactgcatccttcccggaggctctgagtcagaagcaaacagcagataactgtccagggacaggcaggcagcagccattcatggtgttcatagacctttgtctcaagaacaggacactagatgaatgcctcacccacctcttagagtggggcaagcagagaaaaggcttactgcatgtgtgttgcaaggagctgcaggtttttggaatgcccatccacagtatcatagaggtcctgaacatggtggagcttgactgtatccaggaggtggaagtgtgctgcccctgggagctgtccactcttgtgaagtttgccccttacctgggccagatgaggaatctccgcaaacttgttctcttcaacatccgtgcatctgcctgcattcccccagacaacaaggggcagttcattgcccgattcacctctcagttcctcaagctggactatttccagaatctgtctatgcactccgtctctttcctcgaaggccacctggaccagctgctcaggtgtctccaggcctccttggagatggtcgttatgaccgactgcctgctgtcagagtcggacttgaagcatctctcttggtgcccgagcatccgtcaattaaaggagctggacctgaggggtgtcacgctgacccatttcagccctgagcccctcacaggtctgctggagcaagttgtggccaccctgcagaccctggacttagaggactgtgggatcatggattcccaactcagcgccatcctgcctgtcctgagccgctgctcccagctcagcaccttcagcttctgtgggaacctcatctccatggctgcccttgagaacctgctgcgccacaccgtcgggctgagcaagctaagcctggagctgtatcctgcccctctggagagttatgacacccagggtgctctctgctgggggagatttgctgaacttggggctgagctgatgaagacaccgagggacttaaggcagcccaagatcattgtgttctgcaccgtcccctgccctcgctgtggcatcagggcctcctatgacctggagcccagtcactgcctctgttga

SEQ ID NO: 16 - DNA, 914 bp, Homo sapiens
  human guanine nucleotide binding protein (G protein), gamma 3 (GNG3) precursor cDNA
aggcagttggtatgctccaggatctgagcagctccttctagcatccttcatccttcaggtaccagccatccagacagtgcttgagctgcagaaactgagaccagacctctggcctggccctccccaggggcctcctttcctatagtcactgcttctgcatcagatactttcagctgcaactccctactgggtggggcacccatttcaggcagaaggttttggtaccctccactgaccctacacccagggctgctactgccgcttgtggcttcaggatgaaaggtgagaccccggtgaacagcactatgagtattgggcaagcacgcaagatggtggaacagcttaagattgaagccagcttgtgtcggataaaggtgtccaaggcagcagcagacctgatgacttactgtgatgcccacgcctgtgaggatcccctcatcacccctgtgcccacttcggagaaccccttccgggagaagaagttcttctgtgctctcctctgagctcccctgtcccttctcacaactcctcccttttccctctcctgggcccttccttaggtcagtaattgttgtgagccccttaggctccttgcatcccatccctaacccttgcctgaccatgtgaggttatctgaagcacaaggcccaccctcacctatctgtcgaccccatttcctaccacctttgtggccgaccccaagcaccccagagatatgaggcaccctttgctccacccacagcagggccccgtcagactctgccagcgcgtcctgcccgcttccctcggtgacctgctcagacaatggagagggatgggccaggttcttgctctcagtctcacctggagctactgggagggtaaagccatttgaagaataaagtcatccagagcctcaggacaaaaaaaaaaaa

SEQ ID NO: 17 - DNA, 4502 bp, Homo sapiens
  human Rho guanine nucleotide exchange factor (GEF) 10-like (ARHGEF10L), transcript variant 1 cDNA
gcgccgtcccggccatgggcgcccgcggcggcctgcggagctggaggcgcggcgccggccgccaggcgcctttgtgagcggcgcggacgacaaaggcgcgggcccgggcagccgaggtgtgtagctgggacggtgctggtctgagctggaccttgtctgatggcttcctccaaccctcctccacagcctgccataggagatcagctggttccaggagtcccaggcccctcctctgaggcagaggacgacccaggagaggcgtttgagtttgatgacagtgatgatgaagaggacaccagcgcagccctgggcgtccccagccttgctcctgagagggacacagaccccccactgatccacttggactccatccctgtcactgacccagacccagcagctgctccacccggcacaggggtgccagcctgggtgagcaatggggatgcagcggacgcagccttctccggggcccggcactccagctggaagcggaagagttcccgtcgcattgaccggttcactttccccgccctggaagaggatgtgatttatgacgacgtcccctgcgagagcccagatgcgcatcagcccggggcagagaggaacctgctctacgaggatgcgcaccgggctggggcccctcggcaggcggaggacctaggctggagctccagtgagttcgagagctacagcgaggactcgggggaggaggccaagccggaggtcgaggtcgagcccgccaagcaccgagtgtccttccagcccaagctttctccagacctgactaggctaaaggagagatacgccaggactaagagagacatcttggctttgagagttggggggagagacatgcaggagctgaagcacaagtacgattgtaagatgacccagctcatgaaggccgccaagagcgggaccaaggatgggctggagaagacacggatggccgtgatgcgcaaagtctccttcctgcacaggaaggacgtcctcggtgactcggaggaggaggacatggggctcctggaggtcagcgtttcggacatcaagcccccagccccagagctgggccccatgccagagggcctgagccctcagcaggtggtccggaggcatatcctgggctccatcgtgcagagcgaaggcagctacgtggagtctctgaagcggatactccaggactaccgcaaccccctgatggagatggagcccaaggcgctgagcgcccgcaagtgccaggtggtgttcttccgcgtgaaggagatcctgcactgccactccatgttccagatcgccctgtcctcccgcgtggctgagtgggattccaccgagaagatcggggacctcttcgtggcctcgttttccaagtccatggtgctagatgtgtacagtgactacgtgaacaacttcaccagtgccatgtccatcatcaagaaggcctgcctcaccaagcctgccttcctcgagttcctcaagcgacggcaggtgtgcagcccagaccgtgtcaccctctacgggctgatggtcaagcccatccagaggttcccacagttcatactcctgcttcaggacatgctgaagaacacccccaggggccatccggacaggctgtcgctgcagctggccctcacagagctggagacgctggctgagaagctgaacgagcagaagcggctggctgaccaggtggctgagatccagcagctgaccaagagcgtcagtgaccgcagcagcctcaacaagctgttgacctcaggccagcggcagctgctcctgtgtgagacgttgacggagaccgtgtacggtgaccgcgggcagctaattaagtccaaggagcgtcgggtcttcctgctcaacgacatgcttgtctgtgccaacatcaacttcaagcctgccaaccacaggggccagctggagatcagcagcctggtgcccctggggcccaagtatgtggtgaagtggaacacggcgctgccccaggtgcaggtggtggaggtgggccaggacggtggcacctatgacaaggacaatgtgctcatccagcactcaggcgccaagaaggcctctgcctcagggcaggctcagaataaggtgtacctcggccccccacgcctcttccaggagctgcaggacctgcagaaggacctggccgtggtggagcagatcacgcttctcatcagcacgctgcacggcacctaccagaacctgaacatgactgtggctcaagactggtgcctggccctgcagaggctgatgcgggtgaaggaggaagagatccactcggccaacaagtgccgtctcaggctcctgcttcctgggaaacccgacaagtccggccgccccattagcttcatggtggttttcatcacccccaaccccctgagcaagatttcctgggtcaacaggttacatttggccaaaatcggactccgggaggagaaccagccaggctggctatgcccggatgaggacaagaagagcaaagccccattctggtgcccgatcctggcctgctgcatccctgccttctcctcccgggcactcagcctgcagcttggggccctggtccacagtcctgtcaactgtcccctgctgggtttctcagcagtcagcacctcccttccacagggctacctctgggtcgggggcggacaggaaggcgcagggggccaggtggaaatcttttccttgaaccggccctcgccccgcaccgtcaagtccttcccactggcagcccctgtgctctgcatggagtatatcccggagctggaggaggaggcggagagcagagacgagagcccgacagttgctgacccctcggccacggtgcatccaaccatctgcctcgggctccaggatggcagcatcctcctctacagcagtgtggacactggcacccagtgcctggtgagctgcaggagcccaggtctgcagcctgtgctctgcctgcgacacagccccttccacctgctcgctggcctgcaggatgggacccttgctgcttaccctcggaccagcggaggtgtcctgtgggacctggagagccctcccgtgtgcctgactgtggggcccgggcctgtccgcaccctgttgagcctggaggatgccgtgtgggccagctgtgggccccgggtcactgtcctggaagccaccaccctgcagcctcagcaaagcttcgaggcgcaccaggacgaggcagtgagcgtgacacacatggtgaaggcgggcagcggcgtctggatggccttctcctccggcacctccatccgcctcttccacactgagaccctggagcatctgcaagagatcaacatcgccaccaggaccaccttcctcctgccaggccagaagcacttgtgtgtcaccagcctcctgatctgccagggtctgctctgggtgggcactgaccagggtgtcatcgtcctgctgcccgtgcctcggctggaaggcatccccaagatcacagggaaaggcatggtctcactcaacgggcactgtgggcctgtggccttcctggctgtggctaccagcatcctggcccctgacatcctgcggagtgaccaggaggaggctgaggggccccgggctgaggaggacaagccagacgggcaggcacacgagcccatgcccgatagccacgtgggccgagagctgacccgcaagaagggcatcctcttgcagtaccgcctgcgctccaccgcacacctcccgggcccgctgctctccatgcgggagccggcgcctgctgatggcgcagctttggagcacagcgaggaggacggctccatttacgagatggccgacgaccccgacatctgggtgcgcagccggccctgcgcccgcgacgcccaccgcaaggagatttgctctgtggccatcatctccggcgggcagggctaccgcaactttggcagcgctctgggcagcagtgggaggcaggccccgtgtggggagacggacagcaccctcctcatctggcaggtgcccttgatgctatagcgcctcccctctcccctcagagggcacagctgcaggcctgaccaaggccacgcccggctctcgtgctctaggacctgcacgggacttgtggatgggcctggactctccagaaactacttgggcagagcaaaggaaaacctcttgttttaaaaaaatttttttcagagtgttttggggaggagttttagggcttggggagagggaggacacatctggaggaaatggccttctttttaaaagcaaaaaacacaaaacctcacaactgcctggcaagcccagtatcacttgtttgggccctagcgggactccaaggcagccacacgcccctcctggaagggtgtgtgcgtgtgagtgtgtgcgagtgtgtgggctggtgtgtgaatatctataaataagtatatatggtgtatattatatgtgtataaataaagtctgtacatattggagctctgggagatgctggaataaaagacaagagttacatctggacttggaaaaaaaaa

SEQ ID NO: 18 - DNA, 4269 bp, Homo sapiens
  human Rho guanine nucleotide exchange factor (GEF) 10-like (ARHGEF10L), transcript variant 2 cDNA
gtgtgtagctgggacggtgctggtctgagctggaccttgtctgatggcttcctccaaccctcctccacagcctgccataggagatcagctggttccaggagtcccaggcccctcctctgaggcagaggacgacccaggagaggcgtttgagtttgatgacagtgatgatgaagaggacaccagcgcagccctgggcgtccccagccttgctcctgagagggacacagaccccccactgatccacttggactccatccctgtcactgacccagacccagcagctgctccacccggcacaggggtgccagcctgggtgagcaatggggatgcagcggacgcagccttctccggggcccggcactccagctggaagcggaagagttcccgtcgcattgaccggttcactttccccgccctggaagaggatgtgatttatgacgacgtcccctgcgagagcccagatgcgcatcagcccggggcagagaggaacctgctctacgaggatgcgcaccgggctggggcccctcggcaggcggaggacctaggctggagctccagtgagttcgagagctacagcgaggactcgggggaggaggccaagccggaggtcgaggtcgagcccgccaagcaccgagtgtccttccagcccaagatgacccagctcatgaaggccgccaagagcgggaccaaggatgggctggagaagacacggatggccgtgatgcgcaaagtctccttcctgcacaggaaggacgtcctcggtgactcggaggaggaggacatggggctcctggaggtcagcgtttcggacatcaagcccccagccccagagctgggccccatgccagagggcctgagccctcagcaggtggtccggaggcatatcctgggctccatcgtgcagagcgaaggcagctacgtggagtctctgaagcggatactccaggactaccgcaaccccctgatggagatggagcccaaggcgctgagcgcccgcaagtgccaggtggtgttcttccgcgtgaaggagatcctgcactgccactccatgttccagatcgccctgtcctcccgcgtggctgagtgggattccaccgagaagatcggggacctcttcgtggcctcgttttccaagtccatggtgctagatgtgtacagtgactacgtgaacaacttcaccagtgccatgtccatcatcaagaaggcctgcctcaccaagcctgccttcctcgagttcctcaagcgacggcaggtgtgcagcccagaccgtgtcaccctctacgggctgatggtcaagcccatccagaggttcccacagttcatactcctgcttcaggacatgctgaagaacacccccaggggccatccggacaggctgtcgctgcagctggccctcacagagctggagacgctggctgagaagctgaacgagcagaagcggctggctgaccaggtggctgagatccagcagctgaccaagagcgtcagtgaccgcagcagcctcaacaagctgttgacctcaggccagcggcagctgctcctgtgtgagacgttgacggagaccgtgtacggtgaccgcgggcagctaattaagtccaaggagcgtcgggtcttcctgctcaacgacatgcttgtctgtgccaacatcaacttcaagcctgccaaccacaggggccagctggagatcagcagcctggtgcccctggggcccaagtatgtggtgaagtggaacacggcgctgccccaggtgcaggtggtggaggtgggccaggacggtggcacctatgacaaggacaatgtgctcatccagcactcaggcgccaagaaggcctctgcctcagggcaggctcagaataaggtgtacctcggccccccacgcctcttccaggagctgcaggacctgcagaaggacctggccgtggtggagcagatcacgcttctcatcagcacgctgcacggcacctaccagaacctgaacatgactgtggctcaagactggtgcctggccctgcagaggctgatgcgggtgaaggaggaagagatccactcggccaacaagtgccgtctcaggctcctgcttcctgggaaacccgacaagtccggccgccccattagcttcatggtggttttcatcacccccaaccccctgagcaagatttcctgggtcaacaggttacatttggccaaaatcggactccgggaggagaaccagccaggctggctatgcccggatgaggacaagaagagcaaagccccattctggtgcccgatcctggcctgctgcatccctgccttctcctcccgggcactcagcctgcagcttggggccctggtccacagtcctgtcaactgtcccctgctgggtttctcagcagtcagcacctcccttccacagggctacctctgggtcgggggcggacaggaaggcgcagggggccaggtggaaatcttttccttgaaccggccctcgccccgcaccgtcaagtccttcccactggcagcccctgtgctctgcatggagtatatcccggagctggaggaggaggcggagagcagagacgagagcccgacagttgctgacccctcggccacggtgcatccaaccatctgcctcgggctccaggatggcagcatcctcctctacagcagtgtggacactggcacccagtgcctggtgagctgcaggagcccaggtctgcagcctgtgctctgcctgcgacacagccccttccacctgctcgctggcctgcaggatgggacccttgctgcttaccctcggaccagcggaggtgtcctgtgggacctggagagccctcccgtgtgcctgactgtggggcccgggcctgtccgcaccctgttgagcctggaggatgccgtgtgggccagctgtgggccccgggtcactgtcctggaagccaccaccctgcagcctcagcaaagcttcgaggcgcaccaggacgaggcagtgagcgtgacacacatggtgaaggcgggcagcggcgtctggatggccttctcctccggcacctccatccgcctcttccacactgagaccctggagcatctgcaagagatcaacatcgccaccaggaccaccttcctcctgccaggccagaagcacttgtgtgtcaccagcctcctgatctgccagggtctgctctgggtgggcactgaccagggtgtcatcgtcctgctgcccgtgcctcggctggaaggcatccccaagatcacagggaaaggcatggtctcactcaacgggcactgtgggcctgtggccttcctggctgtggctaccagcatcctggcccctgacatcctgcggagtgaccaggaggaggctgaggggccccgggctgaggaggacaagccagacgggcaggcacacgagcccatgcccgatagccacgtgggccgagagctgacccgcaagaagggcatcctcttgcagtaccgcctgcgctccaccgcacacctcccgggcccgctgctctccatgcgggagccggcgcctgctgatggcgcagctttggagcacagcgaggaggacggctccatttacgagatggccgacgaccccgacatctgggtgcgcagccggccctgcgcccgcgacgcccaccgcaaggagatttgctctgtggccatcatctccggcgggcagggctaccgcaactttggcagcgctctgggcagcagtgggaggcaggccccgtgtggggagacggacagcaccctcctcatctggcaggtgcccttgatgctatagcgcctcccctctcccctcagagggcacagctgcaggcctgaccaaggccacgcccggctctcgtgctctaggacctgcacgggacttgtggatgggcctggactctccagaaactacttgggcagagcaaaggaaaacctcttgttttaaaaaaatttttttcagagtgttttggggaggagttttagggcttggggagagggaggacacatctggaggaaatggccttctttttaaaagcaaaaaacacaaaacctcacaactgcctggcaagcccagtatcacttgtttgggccctagcgggactccaaggcagccacacgcccctcctggaagggtgtgtgcgtgtgagtgtgtgcgagtgtgtgggctggtgtgtgaatatctataaataagtatatatggtgtatattatatgtgtataaataaagtctgtacatattggagctctgggagatgctggaataaaagacaagagttacatctggacttggaaaaaaaaa

SEQ ID NO: 19 - DNA, 1192 bp, Homo sapiens
  human microtubule-associated protein 1 light chain 3 gamma (MAP1LC3C) cDNA
ggaggaatgagttaggttcccggttgcgggacagtttttttttcttttttaaaacagacacagctactgagtgcaatgccgcctccacagaaaatcccaagcgtcagacccttcaagcagaggaaaagcttggcaatcagacaagaggaagttgctggaatccgggcaaagttccccaacaaaatcccggtggtagtggagcgctaccccagggagacgttcctgcccccgctggacaaaaccaagttcctggtcccgcaggagctgaccatgacccagttcctcagcatcatccggagccgcatggtcctgagagccacggaagccttttacttgctggtgaacaacaagagcctggtcagcatgagcgcaaccatggcagagatctacagagactacaaggatgaggatggcttcgtgtacatgacctacgcctcccaggagacatttggctgcctggagtcagcagcccccagggatgggagcagccttgaggacagaccctgcaatcctctctagcccatgtcgggaaggatgtgtgctctgacagacgtgtcagatgctggcagaagggattggttttctcctgtgtatacagtggaggagtctgagaagcagggatgcctggggtgatcagctccaaccagtggcagcagagtggtggctcttcctagtttagtttttgtgctccgtgttcttgtgtccttctaagaaaaatgtgggctgctcttgaaagttatataattatcatttttttttttttgaaacagggtcttgctctattgcctaggctggagcacagtggcatgatcttggctcactgcaacctccgcctcctgggttcaagtgattcttctgcctccaccccccgagtggctggtattacaagcacatgccaccacaccaggctaatttttgtatttttagtagagacggggtttcaccatgttggccaggctggtctcgaactcctgacctcaggtgatccacccacctcggcctcccaaagtgctgggattacaggcgtgagccactgcatccagccatataaccgtattctaaataagaaatggttggcttgtgtgatggttttgtgtaatgagctagagataatattttaagtgtcttctgtggtatatgtgggagggccattaaggagtgggtttcactccctgcatgtgggcaggtgtcc

SEQ ID NO: 20 - DNA, 1112 bp, Homo sapiens
  human chromosome 20 open reading frame 71 (C20orf71), transcript variant 1, short palate, lung and nasal epithelium carcinoma-associated protein 3 (SPLUNC3) cDNA
agggttccacatgttgctctcccaatgtgagcaagccctggtggcagcgccagggtccagtgcagcccctccccacagcatgctgggggctaattctgatgtcatctttctgcagaaaaccattagaccatccctccagactgccaccctcaaagccgtctgcccaggccccatctgacactcttgacatctgcaggtcccagaccctatgatgtgtccactctggaggctcctcatcttcctcgggttgctggccttgcccttggcaccacacaagcagccttggcctggcctggcccaagcccacagagacaacaaatccaccctggcaagaattattgctcagggcctcataaagcacaacgcagaaagccgaattcagaacatccactttggggacagactgaatgcctcagcacaagtggccccagggctggtgggctggctaatcagcggcaggaaacaccagcagcagcaagagagcagcatcaacatcaccaacattcagctggactgtggtgggatccagatatcattccataaggagtggttctcggcaaatatctcacttgaatttgaccttgaattgagaccgtccttcgataacaacatcgtaaagatgtgtgcacatatgagcatcgttgtggagttctggctggagaaagacgagtttggccggagggatctggtgataggcaaatgcgatgcagagcccagcagtgtccatgtggccatcctcactgaggctatcccaccaaagatgaatcagtttctctacaacctcaaagagaatctgcaaaaagttctcccacacatggtagaaagtcaggtatgtcctctgatcggtgaaatcctcgggcagctggatgtgaaactgttgaaaagcctcatagaacaggaggctgctcatgaaccaacccaccatgaaaccagccaaccctctgcatgccaggctggagagtcccccagctgacttctgctgatcagaaggaaagtccacatcttgcaaccttaagtctcccttagagtggggcttctgctaccctaaaaactttaccccaggctctgtggacataccatcctctcctacaataaactctagctctgaaaaa

SEQ ID NO: 21 - DNA, 1004 bp, Homo sapiens
  human chromosome 20 open reading frame 71 (C20orf71), transcript variant 2, short palate, lung and nasal epithelium carcinoma-associated protein 3 (SPLUNC3) cDNA
agggttccacatgttgctctcccaatgtgagcaagccctggtggcagcgccagggtccagtgcagcccctccccacagcatgctgggggctaattctgatgtcatctttctgcagaaaaccattagaccatccctccagactgccaccctcaaagccgtctgcccaggccccatctgacactcttgacatctgcaggtcccagaccctatgatgtgtccactctggaggctcctcatcttcctcgggttgctggccttgcccttggcaccacacaagcagccttggcctggcctggcccaagcccacagagacaacaaatccaccctggcaagaattattgctcagggcctcataaagcacaacgcagaaagccgaattcagaacatccactttggggacagactgaatgcctcagcacaagtggccccagggctggtgggctggctaatcagcggcaggaaacaccagcagcagcaagagagcaggtccttcgataacaacatcgtaaagatgtgtgcacatatgagcatcgttgtggagttctggctggagaaagacgagtttggccggagggatctggtgataggcaaatgcgatgcagagcccagcagtgtccatgtggccatcctcactgaggctatcccaccaaagatgaatcagtttctctacaacctcaaagagaatctgcaaaaagttctcccacacatggtagaaagtcaggtatgtcctctgatcggtgaaatcctcgggcagctggatgtgaaactgttgaaaagcctcatagaacaggaggctgctcatgaaccaacccaccatgaaaccagccaaccctctgcatgccaggctggagagtcccccagctgacttctgctgatcagaaggaaagtccacatcttgcaaccttaagtctcccttagagtggggcttctgctaccctaaaaactttaccccaggctctgtggacataccatcctctcctacaataaactctagctctgaaaaa

SEQ ID NO: 22 - DNA, 1734 bp, Homo sapiens
  human chromosome 20 open reading frame 114 (C20orf114), long palate, lung and nasal epithelium carcinoma-associated protein 1 (LPLUNC1) precursor cDNA
ggtctgaggcctctgcctaaagacaaagcctgtgctggggtgtgcaggatataaggttggacttccagacccactgcccgggagaggagaggagcgggccgaggactccagcgtgcccaggtctggcatcctgcacttgctgccctctgacacctgggaagatggccggcccgtggaccttcacccttctctgtggtttgctggcagccaccttgatccaagccaccctcagtcccactgcagttctcatcctcggcccaaaagtcatcaaagaaaagctgacacaggagctgaaggaccacaacgccaccagcatcctgcagcagctgccgctgctcagtgccatgcgggaaaagccagccggaggcatccctgtgctgggcagcctggtgaacaccgtcctgaagcacatcatctggctgaaggtcatcacagctaacatcctccagctgcaggtgaagccctcggccaatgaccaggagctgctagtcaagatccccctggacatggtggctggattcaacacgcccctggtcaagaccatcgtggagttccacatgacgactgaggcccaagccaccatccgcatggacaccagtgcaagtggccccacccgcctggtcctcagtgactgtgccaccagccatgggagcctgcgcatccaactgctgcataagctctccttcctggtgaacgccttagctaagcaggtcatgaacctcctagtgccatccctgcccaatctagtgaaaaaccagctgtgtcccgtgatcgaggcttccttcaatggcatgtatgcagacctcctgcagctggtgaaggtgcccatttccctcagcattgaccgtctggagtttgaccttctgtatcctgccatcaagggtgacaccattcagctctacctgggggccaagttgttggactcacagggaaaggtgaccaagtggttcaataactctgcagcttccctgacaatgcccaccctggacaacatcccgttcagcctcatcgtgagtcaggacgtggtgaaagctgcagtggctgctgtgctctctccagaagaattcatggtcctgttggactctgtgcttcctgagagtgcccatcggctgaagtcaagcatcgggctgatcaatgaaaaggctgcagataagctgggatctacccagatcgtgaagatcctaactcaggacactcccgagttttttatagaccaaggccatgccaaggtggcccaactgatcgtgctggaagtgtttccctccagtgaagccctccgccctttgttcaccctgggcatcgaagccagctcggaagctcagttttacaccaaaggtgaccaacttatactcaacttgaataacatcagctctgatcggatccagctgatgaactctgggattggctggttccaacctgatgttctgaaaaacatcatcactgagatcatccactccatcctgctgccgaaccagaatggcaaattaagatctggggtcccagtgtcattggtgaaggccttgggattcgaggcagctgagtcctcactgaccaaggatgcccttgtgcttactccagcctccttgtggaaacccagctctcctgtctcccagtgaagacttggatggcagccatcagggaaggctgggtcccagctgggagtatgggtgtgagctctatagaccatccctctctgcaatcaataaacacttgcctgtgatgcctgcaaaaaaa

SEQ ID NO: 23 - DNA, 3030 bp, Homo sapiens
  human sushi domain containing 4 (SUSD4), transcript variant 1 cDNA
gggagctggagccgagcgccgccgccgaagcttccgtctcgctcgctcgcgcagcggcggcagcagaggtcgcgcacagatgcgggttagactggcggggggaggaggcggaggagggaaggaagctgcatgcatgagacccacagactcttgcaagctggatgccctctgtggatgaaagatgtatcatggaatgaacccgagcaatggagatggatttctagagcagcagcagcagcagcagcaacctcagtccccccagagactcttggccgtgatcctgtggtttcagctggcgctgtgcttcggccctgcacagctcacgggcgggttcgatgaccttcaagtgtgtgctgaccccggcattcccgagaatggcttcaggacccccagcggaggggttttctttgaaggctctgtagcccgatttcactgccaagacggattcaagctgaagggcgctacaaagagactgtgtttgaagcattttaatggaaccctaggctggatcccaagtgataattccatctgtgtgcaagaagattgccgtatccctcaaatcgaagatgctgagattcataacaagacatatagacatggagagaagctaatcatcacttgtcatgaaggattcaagatccggtaccccgacctacacaatatggtttcattatgtcgcgatgatggaacgtggaataatctgcccatctgtcaaggctgcctgagacctctagcctcttctaatggctatgtaaacatctctgagctccagacctccttcccggtggggactgtgatctcctatcgctgctttcccggatttaaacttgatgggtctgcgtatcttgagtgcttacaaaaccttatctggtcgtccagcccaccccggtgccttgctctggaagtctgtccactacctccaatggtgagtcacggagatttcgtctgccacccgcggccttgtgagcgctacaaccacggaactgtggtggagttttactgcgatcctggctacagcctcaccagcgactacaagtacatcacctgccagtatggagagtggtttccttcttatcaagtctactgcatcaaatcagagcaaacgtggcccagcacccatgagaccctcctgaccacgtggaagattgtggcgttcacggcaaccagtgtgctgctggtgctgctgctcgtcatcctggccaggatgttccagaccaagttcaaggcccactttccccccagggggcctccccggagttccagcagtgaccctgactttgtggtggtagacggcgtgcccgtcatgctcccgtcctatgacgaagctgtgagtggcggcttgagtgccttaggccccgggtacatggcctctgtgggccagggctgccccttacccgtggacgaccagagccccccagcataccccggctcaggggacacggacacaggcccaggggagtcagaaacctgtgacagcgtctcaggctcttctgagctgctccaaagtctgtattcacctcccaggtgccaagagagcacccaccctgcttcggacaaccctgacataattgccagcacggcagaggaggtggcatccaccagcccaggcatcgacattgcagatgagattcctctaatggaagaagatccctaatatgggtcaagatccagatgactctcctgctccttcggggaaaggaccttgtatcttggagtgaggtcacagaaggatagagcctgggggcaaaatgtctaacttgtctacatggggaccacagttcacattatgcatctcaggctccacagtgaggctgacaaactgcaatggcagtgcttttaaatgagatttgaggattcaccaagacccatggggaaccggggcagcagggaagccctcgcgtggtcttggatgaggggtgttaaatgtgtatcgtgctgtggaacatgggacaattccacgcacatcccaccgaatcatcacgcatcccattgactggcaagtactccccgccccctctgaaagcatgtcacatcatgtaaatttgcttctaacatctgcttcaaactgtctctggactccaaatttggatgggtcagcctctgcagaaagtttgtgttgagatgctggaagaacagcagagcctcctgcaccctcagcaagggaccagctcccaaaggaaaggtccttgtgtgacatttggagaatcttccttcatccagacaactctactcgaagcaagacgaaagcaggatgtggcagttgcagtgagaaaggaaaggaaagatgggcagactctgctttctggaaatttcttcacaaagtagagctcatgaactctgtgctgtcttctggtaacatatcatcagtgtttgtattcatggtgtggcacatggatccatggcattgggtaaatctggtggtttttacacatggtcagaatgtgttcaaatacatctcatgatggagacagtaaccaaggtaatgttttgtttcagcattttaaaaagactccacttaacatttatctcagaatcatgagcctctctctagttgacaattgtcattgttcccccagccccaaattgaaccatacatttattttccaaaacagaaattgtttctgtaaacatatccgaccttcaaaagaagtgtgaggttggatttttcccccttttatttgtcctaagattccaggaggctggcctcccagcccagatagctcagccacctcacctgcctatcattcctgcattcctactttgagggtctcatcatgcccactgggtgttgttcctaagaaactgattgattaaaaaatttcccaaagtgtcctgaagtgtctcttcaaatacatgttgatctgtggagttgattcctttccttctcttggttttagacaaatgtaaacaaagctctgatccttaaaattgctatgctgatagagtggtgagggctggaagcttgatcaagtcctgtttcttcttgacacagactgattaaaaattaaaagaaaatgacagtttgaaaaa

SEQ ID NO: 24 - DNA, 1114 bp, Homo sapiens
  human sushi domain containing 4 (SUSD4), transcript variant 2 cDNA
gggagctggagccgagcgccgccgccgaagcttccgtctcgctcgctcgcgcagcggcggcagcagaggtcgcgcacagatgcgggttagactggcggggggaggaggcggaggagggaaggaagctgcatgcatgagacccacagactcttgcaagctggatgccctctgtggatgaaagatgtatcatggaatgaacccgagcaatggagatggatttctagagcagcagcagcagcagcagcaacctcagtccccccagagactcttggccgtgatcctgtggtttcagctggcgctgtgcttcggccctgcacagctcacgggcgggttcgatgaccttcaagtgtgtgctgaccccggcattcccgagaatggcttcaggacccccagcggaggggttttctttgaaggctctgtagcccgatttcactgccaagacggattcaagctgaagggcgctacaaagagactgtgtttgaagcattttaatggaaccctaggctggatcccaagtgataattccatctgtgtgcaagaagattgccgtatccctcaaatcgaagatgctgagattcataacaagacatatagacatggagagaagctaatcatcacttgtcatgaaggattcaagatccggtaccccgacctacacaatatggtttcattatgtcgcgatgatggaacgtggaataatctgcccatctgtcaaggctgcctgagacctctagcctcttctaatggctatgtaaacatctctgagctccagacctccttcccggtggggactgtgatctcctatcgctgctttcccggatttaaacttgatgggtctgcgtatcttgagtgcttacaaaaccttatctggtcgtccagcccaccccggtgccttgctctggaaggaggaagacctgaacatcttttccctgtcctttatttcccacacatcaggttggcagctgctgtgctttatttttgccctgtgttaaagtcctctcccaccccagcacctacctgttcctcaactagcaccaccacatctctgttctaaatgttgttctcctgcaataaaggacgtttgaattaaacattcaaaaaaaaaaaaaaaaaa

SEQ ID NO: 25 - DNA, 5958 bp, Homo sapiens
  human zinc finger protein 33B (ZNF33B) cDNA
gggaggcggtcccgggatttcaggggtctaccggctctcttatggcgaatgcaacccgaagagagagtgagctgtatcttcagagttgtctccgtctttccaagaacagaacaaaatgaacaaggtagatcagaagttccaggggtcagtatcatttaaagatgtgactgtgggcttcacccaggaggagtggcagcacctggaccctagtcagagggctctgtatagagatgtgatgctggagaactacagcaaccttgtctcagtggggtattgtgctcacaaaccagaggtgatcttcaggctggaacaaggagaagaaccatggagactggaggaagaattcccaagccagagctttccagaagtctggacagctgatcacctgaaagagaggagccaagaaaatcaatctaaacatttgtgggaagttgtattcatcaataatgaaatgctgactaaggaacaaggtaatgtaataggaataccatttaacatggacgtaagttcttttccttccagaaaaatgttctgtcagtatgactcacgtggaatgagtttcaacactgtttcagaattggttatcagtaagataaactatttaggaaaaaagtctgacgaatttaatgcatgtgggaaattgttactcaatattaagcatgatgaaactcatactcgagagaaaaatgaagttttgaaaaataggaacactctgagtcatcgtgagaacactttgcagcatgagaagattcaaactttagaccacaattttgaatacagtatatgtcaggaaaccctccttgaaaaggcagtattcaatacacggaagagagagaatgcagaagagaataactgtgactataatgaatttgggagaactttctgtgatagttcatccctcttgttccatcagatacctccatcaaaggacagtcactatgaatttagtgattgtgagaagttcttatgtgtgaagtccaccctttctaaacatgatggggtacctgtgaaacactatgattgtggtgaaagtgggaataatttcaggaggaaattgtgtctgtcacagcttcagaaaggtgataaaggagagaaacactttgaatgtaatgaatgtgggaaagctttctgggagaagtcacatctcactcgacatcagagggtgcacacaggagagaaacactttcaatgtaatcaatgtggaaaaactttctgggagaagtcaaacctcactaaacatcagagatcacacacaggggagaaaccttttgaatgcaatgaatgtgggaaagcctttagccataagtcagccctcacattacaccagagaacacatacaggggagaaaccctatcagtgtaatgcatgtgggaaaactttttaccagaaatctgacctcactaaacatcagagaacacacacagggcagaaaccctatgaatgttatgaatgtggaaaatccttctgtatgaattcacaccttacagtacaccagagaactcacacaggtgagaaaccttttgaatgtcttgagtgtgggaaatccttttgtcaaaagtcacatcttacacagcatcagagaactcacataggagataaaccttatgaatgtaatgcatgtgggaaaactttctaccacaagtcagtactcaccaggcatcagataattcatacagggttgaaaccttatgaatgttatgaatgtgggaaaaccttctgcttgaagtcagacctcacaatacatcagagaacgcacacaggggagaaaccctttgcatgtcctgaatgtgggaaattctttagccataagtcaaccctctctcaacattatagaacacacacgggggagaaaccctatgaatgtcatgaatgtggaaaaatcttttacaataaatcatacctaacaaaacataatagaacacatacaggggagaaaccctatgaatgtaatgaatgtggaaaaaccttctgccagaagtcacaactcactcagcatcagagaattcacataggggagaaaccctatgaatgtaatgagtgtggaaaagctttctgccataagtcagctctaattgtacatcagagaacccatacacaagaaaagccttataaatgtaacgaatgtggaaaatctttctgtgtgaagtcaggacttattttacatgagagaaagcacacgggggagaaaccctatgaatgcaatgaatgtgggaaatccttcagtcacaaatcatcactcacagtacatcacagggctcacacaggagagaaatcttgtcagtgtaatgaatgtggaaaaatcttttaccgtaaatcagaccttgctaaacatcagagatcacatacaggggaaaagccctatgaatgtaacacatgcaggaaaaccttctctcaaaagtcaaatctcattgtacatcagagaacacacataggagaaaaaccttatgaatgaattggatattagaaatttccagccacaagtcagcctccataatgcctcagagtcttcacactgtggagaagggcctgttgacatcctgaatgttcaataactatccacaaactcgccttatgttactccaaagtaacagtaggggataaacccatagactacaacaactataggatggcttttgttaggaagtgatattctgttgaatatcagatggttaatactggcataaaacctcacagatttttttgaatttgtgaaagtttttggcaaaactacaaataggattatgttagcatttacactgaggagaaaattgtcaatttaagaaatctaaagtgaaaattttgcttagaaataaaatatgacaagttctgttttgagtttgatgccataatagtttttaaggtatctaacaataatttatagatgtacattgtggaatgtaaagctttaagaattttttaagaagtaataattaaaataacctcacaagaagttgtaatgagtacagagaattcccgtgtacccttcaccaagcttcctctaaggataatatataatcatagtatatggtcaagtccaagaaatcgatgttaccttgctagtagatgcagacttactcagattttgctatggtttgcgtgcactctgtgtgtgtacgtgtatgtgtgtgtgtgtggttataacaaactggtacttttacatttgagtaaccatcaacacaattagtttacagaatggaaaaggagtctgagatctgtactgtttcaggattacaaaggaatcaggatttagcctcaagtagttcccttgttgtattaataaccacaccctttctgcatccctgtccctggcatccacttgactatgaagctttttgtaaagcatagataaattgaataatcagggcaacagcattaagcacatctgtgaattatccctgaagttcataggacttacatatgtacaagtggtatgtgatataaatcgtgtgtttcatatgcataatggtatttaacgtaattgtgaataggaagtaggtatcctaatttagtagtggttacttcatcaggcccatcccaggtgtttgtcgtgtcctgaaacaatttaaatagagacccacagagctaatgtttatccatttaaaagttataaatcaaaataacagattatctgaaaaaaaatctatcctgtacgtgtgaagatctaggcctgcctccatgttactccctttctcttactacctgtggctcatcccatgccatgaactgcctggggtacatatgtgaacactccagccttcagcgtaagtgatagtccaaattttctttaagcagctgctctccaagacagggccctggaaagaggcccacacatacagcccagttgctgcccagggctgttggactgtcatttcattgctcattgtacccagacagggatctgggccttcagagacttttgagaatatgaagaggagggttgaggctggagaagagccagaatcaagctggcatggggcttttattgacagtgtgaagattgtacactacattacatgatcagatcatacaaataatctaagattttacagtctggtgaccctagattacacaagtaatctaagcttccactttggaaaactagaaaaagaagagcaaattaaatccaaagtaacctggaaaaaaattagagtaaaaatcagtgaaattgaaaagagaaaatcaataaaacccaaaactgttctttgaaaaggtgggtaaaattgataaacctctagctagattaagaaaaaacagaagacaaatactgctaataccaaaagtgaaagaggccatcatagctgatcctatggtcaccaaaaggattagaaagaaatatggacaactctgtccataaatttgataacttagctaaaatggatcaattccttgcaagatgcattctctcaaagctcataaaaggtagatctcagtaggcatatatatctattaaataaattgaagcagtaattaataaccttccaagaccaggcgcggtggctaaaaatacaaaaagttagccgggcgtggtggcatgcgtgtatagtccaagctactcaggaggctgaggcagaagaatcacttgaacctgggaggtggaggttgcagtgagccaagattgtgccactgtactccagcctgggtgacagagtgagactccatctcaataaaattaataataataaaaccttccaaaaaaagtgccgggaccaaatggattcactgatgtgcatttttcgagatacttaaggtagaaatgataccaagtctgtactgtctctttcagaaaataaaagcagggataacacttcccaaatcattttgtgaggccaggattaccctaataccaaagccaggcaaaaacattacaagaaaggaaaactacagatcaatatttccagtgaacacagatgcagaaatccttaaaatgttagcaaatcaggaatgcaagccttgttcaacatttgatattcagtgcaatccattgcatgcattagcagttcaaagattaaatatgatcatatcaataggtacagaaaaagcatttgacaaaatccaatatccattcatgataaaacctctcaacacagaaggaatacaggagaacttactcaatttgataaagaactactacaaaaaaccctacatctagcatcatccttgatgtttccaactaaatgctttcctactaagatcaggaacatggcaaggaacaccactgcttttcagcattgtactggaagtgctatctaatgcagtgataccaaaaaaaaaggaaataaaatgcacataaatttggaaggaggaaatacaactgtctttgttctcaaataacatgattgtctttgtagaaaattctaaataacaaaaacctgctgacattaataagcaattatagcagggttgtagaatgtagtcctcaggtatatgataaaaaagaattagacatcaagtcattaaaagacatataggaaccctaaatgcttattgttaagtgaaaaccaatctgaaaaggctttctatgttgtatgattgcaattatatgacattctgggagaggcaaaactatcgagcgagtcaaaggaccagtggttgctgagagttgaggggaaaggagggatggcaggtaggtgatttttaggacagtgaaagtactctgtagggtactgtaatttgtcaaaatgcagagaatggaaaacagtgaacggaaaacacagagtaaaccctagtgtcaactctggacttcagttaataacagtgtaccactattggctcatcaattgtaacaaatgaaccataatgatgcaagatgttaataattggggagcctgtggaggatgggagggttaaaggtttatatgagaattctctgtactttttgctcaatttttctgtaaccctaaagctgctctaaaaaatgaagtgtattaagtaaataaataagtaaataaccaaccaacc

SEQ ID NO: 26 - DNA, 1469 bp, Homo sapiens
  human olfactory receptor, family 10, subfamily W, member 1 (OR10W1) cDNA
tcccttaccttaatgatttctagccccaagaattccttgacactttcttgtgaatttgctgaaagaattgaattttcattccactctttctgaaaatagctcctgaatcccacccacttcctctgccatttttcttcaatagtatcttacatagtttggcccaactcttggcaggtagaaattgaggtgtagatattaatgtggagaaacttggtaaaagtggagaaaagaaaaagaactagtcttgatccttccagtttctaactccagtgctgattacattagattcatggctcagagtgtaacttaatttatcttcagtctgattcttccttctgtacttgtagctctccacagagaaatactgttagctcaattacctgggaaaatcactcagtgttgatggaatttgtgttcctggcctatccctcctgcccagaactgcatattctgtccttccttggggtcagcctggtttatggtttgatcatcactgggaacattctcattgtggtgtccattcacacagaaacctgtctatgcacatccatgtactatttcctgggcagcctttctgggattgaaatatgctacactgcagtggtggtgccccatatcctggccaacaccctacagtcagagaagaccatcactctcctgggctgtgccacccagatggctttcttcattgcactgggcagtgctgattgcttcctcttggctgccatggcctatgaccgctatgtggccatttgccacccgttgcagtaccctctcctcatgacattgactctttgtgtccacttggttgtggcatcagtcatcagtggtctgttcctgtccttacaactggtggccttcatcttctctctgccattctgccaggctcagggcattgagcacttcttttgtgatgtgccaccagtcatgcatgttgtttgtgctcagagtcacattcatgagcagtcagtgctggtggcagccatactagccattgctgtgcctttcttcctcatcaccacctcctacaccttcatagtggctgctctgctcaagatccactcggctgctggccgccaccgggccttctccacctgctcttcccacctcactgtggtgctgctgcagtatggctgctgtgccttcatgtacctgtgccccagctccagctacaaccccaagcaagatcagttcatctcactggtgtacacattgggaaccccactgctcaacccacttatctatgccctgaggaacagtgagatgaaaggggccgtagggagagttcttaccaggaactgcctttcccagaacagctaggaaagacgaggggacagcctatcaggcaagtatttggttccagcccaccaaatctgtatgaaactgagatttctatcatttggtgttaaaactcatctaaaagatggtataaattatatggatactgtttatgtgtgccaaagattttt

SEQ ID NO: 27 - DNA, 3012 bp, Homo sapiens
  human RCSD domain containing 1 (RCSD1) cDNA
gcgcagggcccccgcggccggggcagtcccgcagccgagcgcagccgggcgcgcgccaccgcccactcgccctgtgcccgccgcagcccgaaactggccacggccgggagcggaggggacagcggggatcgtgagctccggcccgggcgagcgggtgcgtctgccgcagagtcggcacctgaaggacatggaggaaagaccggcagagaccaatgccaatgtggacaactcggcgtccccctcggtggcccagctggccgggcggtttagggagcaggcggctgcagccaaggagacaccagccagtaaaccaacccgaaggaaaccgccctgttccctccccctgttcccccccaaggtagacctgggccagaatggtgaggagaaatcaccacccaatgcgagccaccctcctaaattcaaggtcaagagctcgcctctgattgagaagcttcaggccaatttaacctttgacccagctgctctactgcctggggcctcacccaagagtcctggactcaaggctatggtgtcgccatttcacagcccaccttctacccccagcagccctggtgtgcgatctaggcccagcgaggcagaggaggtgcctgtcagcttcgaccagccccctgaaggcagtcatctgccctgttacaacaaggtgcggacgaggggctcaataaaaaggcgccctccctccaggcgattccgaaggtcacagtcagactgtggagaacttggagatttcagggcggtggagtcatctcagcagaacggtgctaaggaagaggatggggatgaagtgttgccatccaagagcaaggccccaggatcccctttgtccagtgagggagcagcgggagagggagtgagaaccctgggacctgctgaaaagcctcctctgaggaggtcacccagcaggacagagaagcaggaggaggacagggccacagaggaagccaagaacggtgaaaaggccaggcggagttcagaggaggtggacggccagcacccggcccaagaggaggtcccggaatcgccccagacctctggcccagaggcagaaaataggtgtgggagccccagggaggaaaagccagctggagaggaagcagagatggaaaaggctacagaggtgaagggggagagggtgcaaaatgaagaggtgggacctgaacatgacagccaagaaacaaagaagctggaggagggagctgcagtgaaggagaccccccacagtccccctggaggagtgaagggcggagatgtccccaagcaggaaaaaggcaaggaaaaacaacaggagggggcagtgctcgagccaggctgcagcccccagaccggccctgcccagctggagaccagcagtgaggtccagagcgagccagcagtccccaagccggaggatgacactcctgtccaggacactaaaatgtgaagaacagctcattgtgccccagtgatgaagttgctggacacatctctttgcaggtagcagcaacagttgtagcagcagcagacgaagccattgcagaggcagaatatgctgagtgtctggagtcagcctgaagacacagggtggattatttcctggcctccacaccaaacgttcccttgcagatggagactgaatctgagggcagcagacttttatcagcttgagtttatgtcatttgatggacttggttcaacaacaagaacttacttaaaacaatgtactgtggtgatgagtcccaggggcactggtcagcctgtggagccctggatgctatccacacccacctatccctgcagctaatttagctgatctctaatttaactgagctctaatttagctgatcagattttgcttgggtaaagttcctttttaatgttctaaagtgtttacggttctcaaatatcagttaaaaactaattttaggtggccataaacataaaatagaaaccctgtaagttacagaagaccctaaattgtatcaaaaccctagagacaacttttcaatttgatccaaatttgaactggccaaccagtctttaaaacactggactagaagagataatgattgaaacatttaaaaaaaaaaagtgctccattcgcaggagcttttcctgtcctgtggttttccagttggtgaccaccatgggaggtcgctggctcggctcactcccttctcccacccttgagaatgtggagaactcccatggagaggcagaatggcaggaggtttcatgtcccgcgttgcatctcctcctgaaagaaaagcagtgatacctgaataatgctggctctccgattgatcctgtgaggatgaatttgcatttccagaatccttgagcatggattagatgtttcctgggaggtgccttgagtaccattatgtgcaagctacataattaaaacatttttcttagtttccctgggaagcttttcttgactcacagcccaggttcttctgcccaacacaaaaggagtgagttggggtctttagtctcttcttattgggtagctcttgctttaatattctgtttggtgagtgtaagggattctgcaagggacagggggcctgactacccagtctttgacttgtatcctctcccctcttcatacactcctgctgaaaaatgttaatccaaatacacatttaaacttagggtcggtccttattctgatttgagtattttaatgtctcagtgtgctgatttggtagttggaagaattattcttctggaggtctgttagactacatcctacactgacttcagaaaacagtctgtcagacaaaaaggccttatgtcaccactggtacctcagtttcctcatcccatttacagtttttctaactccagggtagtgtttagtgttaatatttgggatatattttttttcaaaactgtttttaagtagtttgtaatttgtaacaaacttgtaacctggttgggactgatattgtcatagctatgataaactttggatattagcagaatttgggaaaaaaaaaaaaaaaaaaaaaa

SEQ ID NO: 28 - DNA, 5828 bp, Homo sapiens
  human coiled-coil domain containing 144A (CCDC144A) cDNA
cggtcctcctttcgcagattggaaaccgcgggctatcctgctgggaggttgtggccgaggcagtagctcgctactgatggcctcctggggtggagaaaagcggggaggggctgaggggtctccgaagccggcagtctacgccacgaggaagacccctagcgtcgggagccagggggaccagtggtacttgggctacccgggggaccagtggtcctcgggcttcccctacagctggtggaaaaacagcgtcggcagcgagagcaagcacggtgagggcgccttagaccagccccagcacgacgtccgcctggaagatcttggcgagctccacagagctgcccggtcgggcgacgtccctggggtggagcacatcttagctcctggagacactggcgtggacaagagggataggaagaagagcattcagcaactagttcctgaatataaggaaaaacagacacctgaaagtcttcctcaaaataacaatccagattggcatcctactaatttgacccttagtgatgagacttgtcagagatccaagaatctgaaagttgatgataaatgtccatctgtatcaccatcaatgcctgaaaatcagtcagcaaccaaagaactgggacagatgaacttaacagaacgagaaaagatggacactggagttgtacttctctcagggaatgatactctccatgacctgtgccaatcacagctaccagaaaacaaagagagcaaagaagcagaacaagactcggagctgacatcagaggaagagcaagaaagacttaaaggatgcgaaaataagcagccacagaaaacgtctcaagaaccagaaatggctaaggattgcgatagagaggatatacctatatatccagtacttcctcatgtgcaaaaatctgaggaaatgtggattgaacaaggcaaattagagtggaaaaaccaattaaaactcgtcataaatgagttaaagcagaggtttggtgaaatttatgaaaaatacaaaattccggcttgtcctgaggaagagccactacttgataactctacaagaggaacagatgtaaaggatattccctttaatttgacaaataacatacctggttgtgaggaagaagatgcatctgaaatatctgtctcagtggtattcgagacatttcctgaacaaaaagaacccagtctcaaaaatatcatccatccatactatcatccatactctgggtcccaggaacatgtttgccagtcatcttctaagtttcatttacatgaaaataaattagactgcgacaatgataacaaaccaggcattggacatatttttagtacagataagaactttcataatgatgcaagcactaagaaagcaaggaacccagaagtggttatggttgaaatgaaagaagaccaagagtttgatttgcaaatgacaaaaaatatgaaccaaaatagtgacagtggcagtacaaacaactataaaagcctgaaacctaaattagaaaatctgagttctttaccaccagattctgacagaacatcagaagtatatctacatgaagaattacagcaagacatgcaaaagtttaagaatgaggtcaacacattagaagaagagttcctggctttgaagaaagaagatgttcaacttcataaagatgttgaagaagaaatggagaagcacagaagtaatagcacagaattatcaggaaccctaactgatggtactactgttggcaatgatgatgatggactaaatcagcagattcctaggaaggaaaatggagagcatgacaggcctgcagataaaacatctaatgaaaagaacgaggtcaaaaaccaaatatatcctgaggctgactttgctgactcaatggagccatctgaaatagcctcagaggattgtgaattgtctcactctgtttatgagaattttatgttgctgattgaacaacttagaatggagtataaagattctgctagcctaccaagaatccaagacacattttgtttgtgtgaacacttactgaaacttaagaataatcactgtgaccaacttacagtaaaacttaaacaaatggaaaatatggtcagtgtactacaaaatgagctatctgaaacaaaaaagacaaaattacagttagaacttcaaaaaattgaatgggagaaagagctgtacgatttgagacttgccttaaaacaagaaaatgaggagaaaagaaatgccgatatgttgtataataaagatagtgaacagttaagaataaaagaagaggagtgtgggaaagtggttgaaacaaagcaacaacttaaatggaatctgagaagacttgttaaggaattgaggacagtaagaaataacttggatctggttgtgcaggagagaaacgatgcccagaagcaactttctgaagaacaggatgccagaatattacaagatcagattctgacgagtaaacaaaaggaactagaaatggctcgaaagaaaatgaattctgagatttctcataggcatcagaaagaaaaggatctctttcatgaagattgcatgttgcaggaagaaattgccttgctgagactggaaatagatacaataaaaaatcagaacaagcaaaaggaaaagaaatattttgaggacattgaggctgtgaaagaaaagaatgataaccttcaaaaaattataaaactaaatgaggaaacattaacagaaacaatactccagtacagtggacagctgaacaatctgacagctgagaacaaaatactcaattctgaactggagaatgggaaacagaaccaagaaagactagaaatagaaatggaatcataccgttgtagactagctgctgctgtacgtgactgtgatcaaagtcagacagcaagagacctaaaacttgatttccagagaacaagacaagagtgggttcgtttacatgacaaaatgaaggttgatatgtctggcctacaagctaagaatgagattctttctgaaaaactttctaatgctgaaagtaaaattaacagcctacaaattcagctccataacacaagagatgctcttggaagagagagtttgattttggaacgtgtgcaaagagacctcagccaaacacagtgtcagaagaaagaaactgaacaaatgtaccaaattgaacaaagcaaactgaagaaatacattgccaagcaggaatctgtagaggagagattatctcaactacaaagtgaaaatatgttgcttcgacagcaactggatgatgctcacaagaaagctaacagtcaagaaaagacaagcagtactatccaagaccagtttcattctgctgccaaaaatcttcaagctgagagtgaaaagcagattctttcactacaagagaagaacaaggagctgatggatgaatataatcatttaaaagaaagaatggatcaatgtgagaaagagaaagcaggaagaaaaattgaccttacagaagcacaggaaactgtaccttcacgatgtctacatctggatgcagagaatgaagttcttcaacttcaacagacattattctctatgaaagcaatacaaaagcaatgtgaaacactacagaagaataagaagcagctgaaacaagaagtagtaaacctcaaaagttatatggaaagaaatatgttagaacgtggtaaagctgaatggcataaactgttgattgaagaaagagcaaggaaggagatagaagaaaaattaaacgaagccattctcaccttgcagaaacaagcagcagtatctcatgaacagttagtacagttaagggaggataatactacttcaataaaaactcagatggaactcacaatcaaagatctggaatctgaaatctccagaataaaaacttcgcaagccgactttaataaaaccgaattggaaagatataaggaactctacctagaagaagtgaaagttagagaatccttgtcaaatgaactcagtagaactaatgagatgatagcagaggtcagtacgcaacttactgtggagaaagagcagaccagatccagatctctattcactgcttatgctacaaggccagtcctagagtcaccttgcgttggaaatcttaatgatagtgaaggtctcaacagaaaacatattccaagaaaaaagaggtctgctcttaaggacatggagagctacttgttgaagatgcagcagaagttgcaaaatgatctaactgcagaagtagcaggatccagccagactggactgcacagaattccacagtgctcgtccttctcctccagctctttgcacttgcttctttgctctatctgccaacctttttttctcatccttcagctgctactaaatatgaacctggatcctatatagcttctcctctaggatttacacacaaggaaaatctgaatcaagatccagttttggaagtaacaaaagaatatgcacagattttaagaagaaaatacatactctgaaagataaggcaattttatttgggctattcacatgatattttgtttcccattaaatatatgatgtgaacatttttactaaagggaaatattctatattatacatgtctgatgaaaatttatatagtattttaaataatgtttcttggcctcttcagctaacttttaagtggattttgcaaatgaaaaccagtattactgagttttacatactcgaactgcccaaatgtttgctgtttaaacagccaaataatcaagttgccattagtaatttagtggagccaattgatggcttgtttgtattttataattttatctttatacatagtgatagatttaagtttagatagacatcattttggtatactggtactgtggtcattgtcaatgtttggatgtattacgattgttatagtgcaatcaaacttagataattttaattttaagcactgatttatttagatctttccttgtggaaaaataaggtttgcctaaggctttttgcttttttatttattgtttcatttctttattagattaacttttgggaaacagtcttaaaattggagaaaatttccacattttaggaaaaacagctttccccctgtgggccatttgagagtaaattgctgacattatgccatcacatctggtatgtgggtattcccacaagtcaggacattttatataactacttcataatcggaaagttaacatcaatacacttgatcatttaattctcagtttcttttcaagttttcttaattgtctataatgttctttgtagcagaaggatcccattcaggtccatgaatttcatttagttgtcatgactctttcagtctggaacagttcctcagtttttctttgacctttatgaccttaaatcttttgaagagtaaagtccaataatacagaatgtccctccattggatttctctgaactttttttatgataagatttagatgataattttttttttggcaagagtatcacagaagttatcccatgatcttctcactgcattctatcaggtgacctgcaattattattattttttattttcatcttttaagttcaggggtacatgtgcaggatgtgcaggatgtccaggtttgttacataggtaaatatgtgccatggtggtttgctgcacagatcatcccatcacctaggtattaataatagcccagcatccattagctgttcttcacgatgctctcccttctttcacccgccaccatcccacatgcccctgtgtgtgttgttccccgccatgtgtccatgtgttctcattattcagctcccacttgtaagtgagagcatgcagtatttcattttctatttctgcgttggtttgctgagg

SEQ ID NO: 29 - DNA, 761 bp, Homo sapiens
  human postmeiotic segregation increased 2-like 2 pseudogene (PMS2L2), transcribed
gagagctgagagctcgaggtgagctgggctcgcggtcgcccctctcgctcgccctctttgagaaccacggcttccgacctccctggaaatggggggaacatggccgaggcgcgtgggaggccgcctcgtggaggccccggagcggcatcctcagcgccccagcgatccggtgcccattagatttctttagtacagaacctgctaaggccatcaaacctattgatcggaagtcagtccatcagatttgctctgggccggtggtactgagtctaagcactgcggtgaagaagatagtaggaaacagtctggatgctggtgccactaatattgatctaaagcttaaggactatggaatggatctcattgaagtttcaggcaatggatgtggggtagaagaagaaaacttcgaaggcttaatctctttcagctctgaaacatcacacatctaagattcaagagtttgccgacctaactcgggttgaaacttttggctttcgggggaaagctctgagctcactttgtgcactgagtgatgtcaccatttctacctgccacgtatcggcgaaggttgggactcgactggtgtttgatcacgatgggaaaatcatccagaaaaccccctacccccaccccagagggaccacagtcagcgtgaagcagttattttctacgctacctgtgcgccataaggaatttcaaaggaatattaagaagaaacgtgcctgcttccccttcgccttctgccgtgattgtcagtttct

SEQ ID NO: 30 - DNA, 8732 bp, Homo sapiens
  human attractin-like 1 (ATRNL1) precursor cDNA
agttggcgcgggccgcgggcgaggcggggccgcgcgcggggtcccctcctcctcccggtcaggtcccctcaggagcgccgggcgcagtctgcgcctcccgctccccgcctccggccgggtccgggacgccgcggctgtggggtcggcccgctaaggacaaggtcgggagactgggtggcgatgcccgagtgcgactggaggcagccgagcggaggcgacggcggttgggatctgtccctcctgaccggggagcgggactcggacgggcgccggtgaggaggaggagaagcggcggcggagaggttttctgcggccggaattcccttcaacagcatccctgtcggcgcccgcgagcgcagtctcgccgggcaggggcgccggggaagatggagactgggggccgggcccgcactggtaccccgcagccagcggccccgggggtgtggagggctcggccggcgggcggcggcggcgggggcgcctcctcctggctgctggacgggaacagctggctgctgtgctatggcttcctctacctggcgctctacgcgcaggtgtcccagtccaagccgtgcgagaggaccggctcctgcttctcgggccgctgtgtcaactccacctgcctctgcgacccgggctgggtgggggaccagtgccagcactgccagggcaggttcaagttaacagaaccttctggatatttaacagatggcccaattaactataaatataaaactaaatgtacttggctcattgaaggctatccaaatgcagtgttaagattaagattcaatcattttgctacagaatgtagctgggatcatatgtatgtttatgatggagattcaatatatgcacctttaatagctgtacttagtggtttgatagtccctgaaataaggggcaatgaaactgtgcctgaagttgttactacatctggctatgcactgttacatttttttagtgatgctgcgtataatctaactggtttcaacattttctattcaatcaattcttgtcctaacaattgctctggtcatgggaagtgtacaactagtgtctctgttccaagtcaagtatattgtgaatgtgataaatactggaagggtgaagcttgtgatattccttactgtaaagccaattgcggcagtccagatcacggttactgtgacctgactggagaaaaattatgtgtctgcaatgatagttggcaaggtcctgattgttctttgaatgttccctctactgagtcttactggattctgccaaacgttaaacccttcagtccttctgtaggtcgggcttcacataaagcagttttacacgggaaatttatgtgggtgattggtggatatacttttaactacagttcttttcaaatggtcctaaattacaatttagaaagcagtatatggaatgtaggaactccatcaaggggacctctccagagatatggacactctcttgctttatatcaggaaaacatctttatgtatggaggcagaattgaaacaaatgatggcaatgtcacagatgaattatgggtttttaacatacatagtcagtcatggagtacaaaaactcctactgttcttggacatggtcagcagtatgctgtggagggacattcagcacatattatggagttggatagtagagatgttgtcatgatcataatatttggatattctgcaatatatggttatacaagcagcatacaggaataccatatctcatcaaacacttggcttgttccagaaactaaaggagctattgtacaaggtggatatggccatactagtgtgtatgatgaaataacaaagtccatttatgttcatggagggtataaagcattgccagggaacaaatatggattggttgatgatctttataaatatgaagttaacactaagacttggactattttgaaagaaagtgggtttgccagataccttcattcagctgttcttatcaatggagctatgcttatttttggaggaaatacccataatgacacttccttgagtaacggtgcaaaatgtttttctgccgatttcctggcatatgacatagcttgtgatgaatggaaaatactaccaaaaccaaatcttcatagagatgtcaacagatttggacactctgcagtagtcattaacgggtccatgtatatatttgggggattttctagtgtactccttaatgatatccttgtatacaagcctccaaattgcaaggctttcagagatgaagaactttgtaaaaatgctggtccagggataaaatgtgtttggaataaaaatcactgtgaatcttgggaatctgggaatactaataatattcttagagcaaagtgccctcctaaaacagctgcttctgatgacagatgttacagatatgcagattgtgccagctgtactgccaatacaaatgggtgccaatggtgtgatgacaagaaatgcatttcggcaaatagtaactgcagtatgtctgtcaagaactacaccaaatgtcatgtgagaaatgagcagatttgtaacaaacttaccagctgtaaaagctgttcactaaacttgaattgccagtgggatcagagacagcaagaatgccaggctttaccagctcatctttgtggagaaggatggagtcatattggggatgcttgtcttagagtcaattccagtagagaaaactatgacaatgcaaaactttattgctataatcttagtggaaatcttgcttcattaacaacctcaaaagaagtagaatttgttctggatgaaatacagaagtatacacaacagaaagtatcaccttgggtaggcttgcgcaagatcaatatatcctattggggatgggaagacatgtctccttttacaaacacaacactacagtggcttcctggcgaacccaatgattctgggttttgtgcatatctggaaagggctgcagtggcaggcttaaaagctaatccttgtacatctatggcaaatggccttgtctgtgaaaaacctgttgttagtccaaatcaaaatgcgaggccgtgcaaaaagccatgctctctgaggacatcatgttccaactgtacaagcaatggcatggagtgtatgtggtgcagcagtacgaaacgatgtgttgactctaatgcctatatcatctcttttccatatggacaatgtctagagtggcaaactgccacctgctcccctcaaaattgttctggattgagaacctgtggacagtgtttggaacagcctggatgtggctggtgcaatgatcctagtaatacaggaagaggacattgcattgaaggttcttcacggggaccaatgaagcttattggaatgcaccacagtgagatggttcttgacaccaatctttgccccaaagaaaagaactatgagtggtcctttatccagtgtccagcttgccagtgtaatggacatagcacttgcatcaataataatgtgtgcgaacagtgtaaaaatctcaccacaggaaagcagtgtcaagattgtatgccaggttattatggagatccaaccaatggtggacagtgcacagcttgtacatgcagtggccatgcaaatatctgtcatctgcacacaggaaaatgtttctgcacaactaaaggaataaaaggtgaccaatgccaattatgtgactctgaaaatcgctatgttggtaatccacttagaggaacatgttattacagccttttgattgattatcaatttaccttcagcttattacaggaagatgatcgccaccatactgccataaactttatagcaaacccagaacagtcgaacaaaaatctggatatatcaattaatgcatcaaacaactttaatctcaacattacgtggtctgtcggttcaacagctggaacaatatctggggaagagacttctatagtttccaagaataatataaaggaatacagagatagtttttcctatgaaaaatttaactttagaagcaatcctaacattacattctatgtgtacgtcagcaacttttcctggcctattaaaatacagattgcattctcacaacacaatacaatcatggaccttgtgcagttttttgtcaccttcttcagttgtttcctatccttattgctggtggctgctgtggtatggaagatcaaacaaacttgttgggcttctcgacggagagagcaactgcttcgagaacgacagcagatggccagccgtccctttgcttctgttgatgtagctctggaagtgggagctgaacaaacagagtttctgcgagggccattagagggggcacccaagccaattgccattgaaccatgtgctgggaacagagctgctgttctgactgtgtttctttgtctaccacgaggatcatcaggtgcccctccccctgggcagtcaggccttgcaattgccagtgccctaatagatatttcacaacagaaagcttcagatagtaaagataagacttctggagtccggaatcgaaaacacctttcaacacgtcaaggaacttgtgtctgagaaatggaaaccgctcctgtatattctgtactgttttacttcgggcttctgttaaagctgttctatggccttggattttatggaggcagatctctgtatcatccagagcctgagtacagtttccttccaaatggacaatgacccaggtggccaaagaatgttcatgagttttataaaagtattgatggtcacaggtgataaagtcagtttttaccactatcttaggcttattatagctaacattaaattactctggaaaaagatgtatattgtttcttaatgaagatgaaaaatatgtaattcatataaatcaactgtttatatcccaagacttgaaagaaagacattttttaatgcctgaatgatgagaattgtacagtttttgcctcataagcaaacttgaatcacctgtgtatgaacagggaatgaacacattgcaatggctttaaatgctcttttatctcgttgtaaaggtaaggcaagattttgatgtagtaggatgtaggtaatgtatttaaatatttcatatgaccatatcgtgtccaaactcagtctgagaatgtgacagctttccgcctaactagaatgcagaccagaatgagttcaactcattctgtgcaacttcacagggggtttattagaatgctcagtgtagaggacattcctgtcatccatgccaactacctaactcgttatcagagctgatagagcatggaaaagtctgtccagcgatcagttgttcccctccttccaaaaacagcctccaataccacaacctgaaaagagccgaaatggttattttacagcatacaagcttctgctccagtatgataatttttaattgcctaagaatcattggatcagacctaaatgatccatctgcatttttataagaatggatctttctttgcccttcctctcctagctgctagattttaactaccttttacaaatgttacaaaatgtattttagaggcgacatctctcaagatgacctgagttccttcctgccaactgttccacctagaatacaagtagagaagagcactggctggcaagcatcaacaggagtcttcttcccaacacgagcgcatccatgtcctgagaaaaagtctgtggtttagaaaatatgtccatggttgcccacagtcagcacactcttagtgactcaaaattctgaattatggcagaaaggaaaaataaaacatacttcacattagaacacagaatcatttacatcctaatactgaccacagttcactaaagctcagtagcattaacagatatagtttggaattgcagtttcctcacttcagggtgacaagatatgtataacagtgacagaaatctccaaagctgctgtatatgatatagctttgttaaatatgaaggtcctttaaatacaattgatgtttagtactatatatgtacttttcacattctttggatttctggaaggttatgacactttactgtttacagctaatgcatagttacttgcatgccatggttgtacagtagcagactatgaccctattgtgatattaagtgtttatttcataatgccatttatacatagctgaatttgatgaggattgaatgtcatatataagaggaatgatcatacaatatgtagttgcatcttatataagatttctaggttgcatctaaccatgactatgtcattattttgataattaggcatttatgaattatagtatatattcctcatgttggcatgataattttgctattttccatgcattaaaaataagacaaattcttagagtaattttagtaattttatctataatctgtggggtttttttggagggggaggccactggttgtttctacttccctgtgatattttctctctcattaaaggaatgagctaagtttgtaaatatctcctaaaaacaatcaagtaattttattagcttcttttggaccctctaaatattgacttctctcatgaaaaaataaattgatgaaactaatgattacaaagatataatcattttttaaaaagtgattgcccaatgtatttctctaacaattgtcacaagagaaagcataacaataaaaatacaaaaacatacagatttagatgtaaaatctatataagctatatttttagggaggctaagcagatagtattactgtggaagaattatcaagttttattcacctcaaatcccactgggttcttaaaacttgaaaattcaaattgtagagaattatgagacacaatgtgatgtttagttaaagtcatgctatacctttctgggccacatattgctaactctgtggctaattatgcaattaattctcaacgtatcaaagcttttcactggcagtaaattctttgccctcaggtgaagtggattgaaaagacatcaaggatcaaggataatcactttgaatctgttggtttttccccctacattccagacactttaaatttggatgctttcattttttttaaatcaaaccacacaaatatgcagatactttcccagaatttcgcagttaaatggctgatcctcttgaaaactaaccttaatggaattctaaacatttcagtttagaatgactttgaaaaattccttagatttttaggatgttttattctgccaagtatgaaaaaaaaatggttaaatacaatggagttttaaaaattaacctggggattctatttgaactagaaaattcctattggaaaagaatttgcacatacttacagattcagctaataaattttaagaggattaggattctcataattctttaaatgaaaatttgttttagtgatacacagagatgccgtatactatagtgttatgttcagtaggaaaacttcaaatagttcgtatttaaaaaggtaattgatccttgctgtacttcccaacatctcatcttcttttagctgcagtaagatagaggtgactgtatggctacagttcatggtataaggtcatttagggtgcacactggcacacaggctggaaaacgggcactggacccagctttcaggtgtgtggtgctgggtaagtttcacctttgaagcctcagccttccatctgtaaagggcggtaatggtgcccacctttcgaggcattgcgaggctagatggtaacacacagaaagctcccacagtgggaccttgatgcagcgtagctggtattaacaaccgtggggacaccaggccactctttttctaccagttgttttatgaatccacctattaattttcatccatcttttggtcgtaggtaaaggtcaatcaggtttttcaaaaagactccctgaataacttaagttcctgtatttctaagatatagggatttctacaaaacgactttgacatttagtcaataaagacttaaactcttcttaaatctatagttttaggagagtttttcttaaaattactgactgatgacattgagacaagagcatcaatgatcacctttcacgtacaaactaggcaagacagggtcagtgcttacattttgtggttatacatgatacatcttttctcagtgaacataaaactatgatttgaaaggtgtcttatatttaaaaaagattgtaaaatgaaaactgaccaaatgaactaattctacccacctatggtctttttaaatgtcgagtttcaaaacccatttgccgtatactagagtgagcttggaaacttacctgattacaggaattgcttgggttcaggcagattcccactttcacctctagagatttagattcagaaacactggggtaggccctggagagcagtactcttaacaagctcctcagtgcttcttaccattaggcaaattagggaaacactgcattgggtcaaagtgctgcctttaatcgaccattagagggagttctctaaataacaaagttattactctaattcaaaatgctttaaagaattttccaaggaatacaagccatctggttggtgttagttatagcagtgatttcattagagtgtacatttaacattttagttttatcaaaattttttgaaattaagaattagaaccagagctcctatcagtatatatgtacacaggtgtgcatgccagtgttcaaaagattgtgtaaaagttcaagcccgttttagaaagccaacattttatgttataatatgctgttaatcaggactttattaaataaaaacattggctcttccaa

SEQ ID NO: 31 - DNA, 3130 bp, Homo sapiens
  human olfactory receptor, family 51, subfamily E, member 1 (OR51E1) cDNA
gggagtaggcggagacagagaggctgtatttcagtgcagcctgccagacctcttctggaggaagactggacaaagggggtcacacattccttccatacggttgagcctctacctgcctggtgctggtcacagttcagcttcttcatgatggtggatcccaatggcaatgaatccagtgctacatacttcatcctaataggcctccctggtttagaagaggctcagttctggttggccttcccattgtgctccctctaccttattgctgtgctaggtaacttgacaatcatctacattgtgcggactgagcacagcctgcatgagcccatgtatatatttctttgcatgctttcaggcattgacatcctcatctccacctcatccatgcccaaaatgctggccatcttctggttcaattccactaccatccagtttgatgcttgtctgctacagatgtttgccatccactccttatctggcatggaatccacagtgctgctggccatggcttttgaccgctatgtggccatctgtcacccactgcgccatgccacagtacttacgttgcctcgtgtcaccaaaattggtgtggctgctgtggtgcggggggctgcactgatggcaccccttcctgtcttcatcaagcagctgcccttctgccgctccaatatcctttcccattcctactgcctacaccaagatgtcatgaagctggcctgtgatgatatccgggtcaatgtcgtctatggccttatcgtcatcatctccgccattggcctggactcacttctcatctccttctcatatctgcttattcttaagactgtgttgggcttgacacgtgaagcccaggccaaggcatttggcacttgcgtctctcatgtgtgtgctgtgttcatattctatgtacctttcattggattgtccatggtgcatcgctttagcaagcggcgtgactctccgctgcccgtcatcttggccaatatctatctgctggttcctcctgtgctcaacccaattgtctatggagtgaagacaaaggagattcgacagcgcatccttcgacttttccatgtggccacacacgcttcagagccctaggtgtcagtgatcaaacttcttttccattcagagtcctctgattcagattttaatgttaacattttggaagacagtattcagaaaaaaaatttccttaataaaaatacaactcagatccttcaaatatgaaactggttggggaatctccattttttcaatattattttcttctttgttttcttgctacatataattattaataccctgactaggttgtggttggagggttattacttttcattttaccatgcagtccaaatctaaactgcttctactgatggtttacagcattctgagataagaatggtacatctagagaacatttgccaaaggcctaagcacggcaaaggaaaataaacacagaatataataaaatgagataatctagcttaaaactataacttcctcttcagaactcccaaccacattggatctcagaaaaatgctgtcttcaaaatgacttctacagagaagaaataatttttcctctggacactagcacttaaggggaagattggaagtaaagccttgaaaagagtacatttacctacgttaatgaaagttgacacactgttctgagagttttcacagcatatggaccctgtttttcctatttaattttcttatcaaccctttaattaggcaaagatattattagtaccctcattgtagccatgggaaaattgatgttcagtggggatcagtgaattaaatggggtcatacaagtataaaaattaaaaaaaaaagacttcatgcccaatctcatatgatgtggaagaactgttagagagaccaacagggtagtgggttagagatttccagagtcttacattttctagaggaggtatttaatttcttctcactcatccagtgttgtatttaggaatttcctggcaacagaactcatggctttaatcccactagctattgcttattgtcctggtccaattgccaattacctgtgtcttggaagaagtgatttctaggttcaccattatggaagattcttattcagaaagtctgcatagggcttatagcaagttatttatttttaaaagttccataggtgattctgataggcagtgaggttagggagccaccagttatgatgggaagtatggaatggcaggtcttgaagataacattggccttttgagtgtgactcgtagctggaaagtgagggaatcttcaggaccatgctttatttggggctttgtgcagtatggaacagggactttgagaccaggaaagcaatctgacttaggcatgggaatcaggcatttttgcttctgaggggctattaccaagggttaataggtttcatcttcaacaggatatgacaacagtgttaaccaagaaactcaaattacaaatactaaaacatgtgatcatatatgtggtaagtttcattttctttttcaatcctcaggttccctgatatggattcctataacatgctttcatccccttttgtaatggatatcatatttggaaatgcctatttaatacttgtatttgctgctggactgtaagcccatgagggcactgtttattattgaatgtcatctctgttcatcattgactgctctttgctcatcattgaatcccccagcaaagtgcctagaacataatagtgcttatgcttgacaccggttatttttcatcaaacctgattccttctgtcctgaacacatagccaggcaattttccagccttctttgagttgggtattattaaattctggccattacttccaatgtgagtggaagtgacatgtgcaatttctatacctggctcataaaaccctcccatgtgcagcctttcatgttgacattaaatgtgacttgggaagctatgtgttacacagagtaaatcaccagaagcctggatttctgaaaaaactgtgcagagccaaacctctgtcatttgcaactcccacttgtatttgtacgaggcagttggataagtgaaaaataaagtactattgtgtcaagtctctgaaaaaaaaaaaaaaaaaaaaaaaaaaaa

SEQ ID NO: 32 - DNA, 978 bp, Homo sapiens
  human olfactory receptor, family 6, subfamily Y, member 1 (OR6Y1) cDNA
atgaccaccataattctggaagtagataatcatacagtgacaacacgtttcattcttctggggtttccaacacgaccagccttccagcttctctttttctccattttcctggcaacctatctgctgacactgctggagaatcttcttatcatcttagctatccacagtgatgggcagctgcataagcccatgtacttcttcttgagccacctctccttcctggagatgtggtatgtcacagtcatcagccccaagatgcttgttgacttcctcagtcatgacaagagtatttccttcaatggctgcatgactcaactttacttttttgtgacctttgtctgcactgagtacatccttcttgctatcatggcctttgaccgctatgtagccatttgtaatccactacgctacccagtcatcatgaccaaccagctctgtggcacactggctggaggatgctggttctgtggactcatgactgccatgattaagatggtttttatagcacaacttcactactgtggcatgcctcagatcaatcactacttttgtgatatctctccactccttaacgtctcctgtgaggatgcctcacaggctgagatggtggacttcttcttggccctcatggtcattgctattcctctttgtgttgtggtggcatcctacgctgctatccttgccaccatcctcaggatcccttctgctcagggccgccaaaaggcattctccacctgtgcctcccacctgaccgtcgtaattctcttctattccatgacacttttcacctatgcccgtcccaaactcatgtatgcctacaattccaacaaagtggtatctgttctctacactgtcattgttccactcctcaaccccatcatttactgtctgaggaaccatgaagtaaaggcagccctcagaaagaccatacattgcagaggaagtgggccccagggaaatggggctttcagtagttaa

SEQ ID NO: 33 - DNA, 1992 bp, Homo sapiens
  human islet amyloid polypeptide (IAPP) precursor cDNA
gggtatataagagctggattactagttagcaaatgagggggtaaatattccagtggatacaagcttggactcttttcttgaagctttctttctatcagaagcatttgctgatattgctgacattgaaacattaaaagaaaatttgagaagcaatgggcatcctgaagctgcaagtatttctcattgtgctctctgttgcattgaaccatctgaaagctacacccattgaaagtcatcaggtggaaaagcggaaatgcaacactgccacatgtgcaacgcagcgcctggcaaattttttagttcattccagcaacaactttggtgccattctctcatctaccaacgtgggatccaatacatatggcaagaggaatgcagtagaggttttaaagagagagccactgaattacttgcccctttagaggacaatgtaactctatagttattgttttatgttctagtgatttcctgtataatttaacagtgcccttttcatctccagtgtgaatatatggtctgtgtgtctgatgtttgttgctaggacatataccttctcaaaagattgttttatatgtagtactaactaaggtcccataataaaaagatagtatcttttaaaatgaaatgtttttgctatagatttgtattttaaaacataagaacgtcattttgggacctatatctcagtggcacaggtttaagaacgaaggagaaaaaggtagtttgaaccttggtaaattgtaaacagctaataatgaagttattcttgacatgagaaaatcagtaattggaccaggcgcggtggctcttgcctgtaatcccagcactttgggaggccgaggcaggcagatcacaaggtcaggagttcgagaccagcctgaccaacatggtgaaaccctgtctctactaaaaatacaaaaattagccgggggtggtgacatgtgcctgtaatcccagctactcaggaggctaaggcaggagaatcgcttaaacccaggaggcggaggttgcagtgagccgagattgcaccactgcactccagcctgggtggcagagtgagactcgtctcaaaaaaaagaaagaaaattagtaattgtaagtacccctgataagcaaattagtaattgtcaatacccctgttaagcaattcctttttgcagtatatttctgaaatgacagaatgctgttttaaaaacaaagaaataaaatcctgctcctgactcggtcaaaatattttttaaagtctattgtttgttgtgcttgctggtactaagaggctatttaaaagtataaaactgctttgtatccatgagggtttcattgtgtgttagcagcagtgagcttctattaaatgtatatgtcatttattttgtttaagtggctttcagcaaacctcagtcatattcttatgcagggtattgcgaaacaacttgtgttctattaatcgtgtcttcaattaaaagaccacagacttctggaaactctttgctgtataagaattatttcttttgtttaacaaattagacatttctggcagaggttatgtatatgatacactttttttgatagcagctgcaatgttggacagaagatgaaatgctttgctttgagtcagattcttatgaatatctgcttttccctgactttgagttaggtagctttggaagtagcattaattcagataaactgccatcatgctgcgttatgccatttctaaagacactcaacttgtacttttaaaaaaatagaaaaaataagcatttcaatctaagtggaaatttgactcattgacttacatttctaagttaaaatttccctttatgaagtgtgccttaggttaccaaattgtagaggctttcgttggtggtggtaagtggtagcggtagtgagtgtatagaggcagggaaatatatttataataaattctatgtcatgaattacatattgaaataaataggtgaatatacaaatttataaaaaaaaaaaaaaaaa

SEQ ID NO: 34 - DNA, 1642 bp, Homo sapiens
  human leucine rich repeat containing 18 (LRRC18) cDNA
cagtttttcatgatttttcctcacactgatcactatccaatcagaacaataaacttctaacactcccttactaaaagaacatggttaagggtgagaaaggccccaagggcaagaagatcaccctcaaggtggccaggaattgcatcaaaatcacttttgatgggaaaaagcgccttgacttgagcaagatgggaattaccaccttccccaagtgtattctgcgccttagtgacatggacgagctggaccttagccggaatcttatcaggaagatccctgactccatctccaagttccagaacctccggtggctggacctgcacagcaactacatagacaagctgcctgagtccattggccagatgaccagcctgctctacctcaacgtcagcaacaaccggctgaccagcaacgggctgcccgtggagctgaagcaactcaagaacatccgcgctgtgaacctaggcttgaaccacctggacagcgtgcccaccacactgggggccctgaaggagctccacgaggtagggctccatgacaacctactgaacaacatccccgtgagcatctccaagctccccaagctgaaaaagctcaacataaagcggaacccctttccaaagccaggtgagtcggaaatattcatagactccatcaggaggctggagaacttgtatgttgtggaggagaaggatctgtgtgcggcttgcctgagaaaatgccaaaacgcccgggacaacctgaatagaatcaagaacatggccacgacgacaccgagaaagaccatctttcccaatctgatctcacccaattccatggccaaggactcctgggaagactggagaatacgcttgacatcttcctagagtagctgtggcaaaatcttgaagactactcagctaacagaataaacgactctgaagaggagaagcccccagttaggagaagacagagtggcaagtgagatgttctggaaaccaggctcgccggagctggccaagccaccgacttgcttctcaaattcacttcacctcccttagctttagcccacctgtgtgtgaaaatgactttgggaaatatttgatgtggtttttaaaatgtatatagaaaaaaatttaagaaaattacagattatatattatagacaactaaatatttaagactttaagacttaaaaggcttactgcctctacatttcactcagactagtacatctcaatgccagtagtctgtgataaatttatgtaggtataatgagatactgatatggtttgggcatttgtctcctccaaacctcatgttgagatttgatccccagtgttggaggtggggcctaatggaaggtcatgggggtgggtccctcatgaatggcctggtgccatccttttggtaatgagtgagttctcactgtattagatcctgttgaaaattgattgttaaaaagaccttggcacctccctctcctctctctctcttcctctcactatgtgatgcctgctccccttcaccttccaccatgagtggaagcacctataccccaaagccctcaccagaaggaggtgccggcacctgtacagcttgtaagaaccatgactcaaataaacttcttttctttataaaaaaaaaaaaaaaaaaaaaaaaa

SEQ ID NO: 35 - DNA, 61 bp, Homo sapiens
  human small nucleolar RNA, C/D box 77 (SNORD77)
cagatactatgatggttgcatagttcagcagatttaatcatgaagagatgtactatctgtc

SEQ ID NO: 36 - DNA, 7802 bp, Homo sapiens
  human lysophosphatidylglycerol acyltransferase 1 (LPGAT1) cDNA
ctccccgccagtccgggcgaacgcggccgggcccttggggaccgagtctcggcgccgccggggaacgggcgcgggccgcgccacagccggagcggggcagggccccgccaccgccttcttccgccggccccgccgccggccatgcattcttccggctcctctgactcccaaagccccggctggggcccggccagcccgagaaagacaggacggagtccagtgtgagaatggctataactttggaagaagctccgtggctgggctggctcttggtgaaagcactgatgaggtttgccttcatggtcgtcaacaacctggttgctattccatcctacatctgctatgtaattatacttcagccccttcgagtgctggacagtaagcggttctggtatatcgaaggaatcatgtataaatggcttttaggaatggtagcttcctggggatggtatgctggatatacagtgatggaatggggagaagatattaaagcagtttcaaaagatgaagcagtgatgttggtgaatcatcaggcaacaggagatgtgtgcacactgatgatgtgcctccaggacaaaggactggttgttgctcagatgatgtggttgatggatcatatttttaagtacacaaactttggaattgtttctctagttcatggagacttctttataagacagggaagatcttatcgtgaccaacagctgctgcttctcaagaagcacttagaaaataattacaggagcagagatcgaaaatggattgttttgtttccagaagggggcttcctcaggaagaggcgagaaacaagtcaggcatttgccaagaaaaataacttgccatttcttacaaatgttactctgccaaggtctggggcaacaaaaattattttgaatgcacttgtagcacaacagaaaaatggaagtccagcaggaggagatgctaaagaattagacagcaaatcaaaaggcctccagtggataatagatacaacgatagcttatcccaaagctgaacctatagatattcaaacctggatccttggatacaggaaaccaacagtcacacatgtacattacaggatctttccaattaaagatgtacccctggagactgatgaccttaccacttggctctatcagcggtttgttgaaaaagaagacctcttatcacatttttatgaaacaggagcttttccaccttccaagggccataaggaagctgtttccagggagatgaccctcagcaacttgtggatatttctcatacagtcttttgcatttttgtcaggctatatgtggtacaacatcattcagtatttttaccattgcctgttttaggaattgacgtggacttgtcaaggtcaccgtaggagttcagactttctttcataagtgtgcattattttacatgtgcaaatcagaatatatttaaaaaaaagcaaaagaaattcaatggatggattaatatttatccccctttgggatattttaaaatctactaaaatgaggattagtaatataatgacctgctaatatattttaagaacatgttttaaaaagatacactctatcacatatttaagcaaacatcacatttggagaagaggaaatcataaaatcatcctagaagactatctgagagaaattctgttgccaccagttatacttgacaatttagttgaagctcagaaagttatattcatccctcttagctgtagtctatattagggcagttctctagaacgcccacatttccaccaactcagtaaacttgaggggagctggttggcacctcgtgaagaactctttccctgtcgtttgcagtaacaaactccagtctgttgcagtaacaaactccagtctgttgcagtaacaaactctagaatattgacattctctgtgggggaaaagcagtgtccactggaccccttctggtactggatgtgttctttacaaaggctagctcagtccaacactgtgtttacatacactcgtgcttttccttatctgacttctcattttgtatcagaggcatatcataaattgataattttgcaaaatgcacttttttgagatgcagatatagcaaaggattagtaatatagcctgaaaacaaatgggagcatagcagtgtgtgaggttctcgagaactgtcttgtctctgtgtgtttatttgcctgccagtgctctccagcgccatcctgccctggacaccaccctgacgtgatgcctctattgcagctcagaggctttattttttccattttgacattggcactaaatgcatttggggatggttaaaacaaattactatagaacatttaaatgatcagtttaaggggaaataggctagtttatagaaaaataagagctagtggcttataatggtgacaggttctcatgtggcacccctaggacctgtgcagacagtagtctgttgaatcattacatcaaggagctgcccctgtcagggtgagtgtaattaggaacgataccagcacataaggctccccccaatctcttccagttgctttttcttttttcttttttttttagacaggtcttactctgtcacccaggctgtagtgcagtggcataatctcagctcactgcagtctctgcctcccgggttcgagcgattctcctgcctcagcctcccgagtagctgggactacaggcacccaccatcatgcttggctaatttttgtatttttagtagagatggggtttcaccatgttggccaggctggcctcgaactcctgacctcaggtgatctgcccacctcggcttcctaaagtgctgggattgcaggcgtgagccaccacgcccggcctccagttgcttttgaagagggtaaagtcaagtttctatttctagaaaacattttttagaaatttgttgcgatgtttgtacaatttacctcataagagaaccacacccttctccaaaagtgctggtactgcatcagtgagatgagtagggtttttgtttgggattgtaagactattaagatcctagtaagtcagtggtagtttactgtgatgtgagcattgtagattcccccgttgtcactaatcacacaacaattttgagaagtaggctataaaacaaaaaaaggttgctgttttctatttttaaataaaccaaaaaaaaacagaaaagatgtgaattttccccagttatgtgggaaaggtaaagcaacaccaaataaaagcccacagcagcttcatctttacgataactcagtgcatatgtgaaagagaatgatgcattaactgaaatacctcattgaatattatactactactggtaaaatgcagaagacagtgttaatgtgtttggtttggggactggttgttataaaatgcaatttttttttaaatctaagcatttcattatgtgttctacagtgtcggtgaataaatgaaaccaatctcaatttagaggtatggatgatgacagaaagcccaatagaagcttaatgatgcttctgtttgaggcccagcaagcaccactaaattactggatgaaatgaaattgttcacttgagggattagtcaaccatctgggggagaagttgctcactgtcaaatacagcatgcacggtcctagctgatagaccttttcctcattgctacagcaagccacagggtagagtgaccagttctcctatccaaaaataaatgcgaacatgcatacataaatgtggctgagggccacttttgccatcactgtgctccaaaggaacatgatattgttaaatatactgtacacattaaactattctataagatgctttacttttcaagtacggtgtcattttcacagtctccagggtgacaaatgccaatagatatgtgagttaatttttttaaatatctccgtgagttgtaaatagatgtgtatttgatctgccctatccttctttgattctttaacatgttctctctcttctgtttgcaaaatatgtttgaaagcattggtagtgctttccttatcagtaactggagttctcctgcttgcactagagaaggtaaagagagaatcagtattcttatatggcaatctggggaagcagcaatatgccactgtacaaaactgaagaaaagttcctaatttgtactttgtgaagggagatgaaaggacgtttaaagtatatatattttgtcaagaggaaagaagataaaactatgccagttttatatcaatagcttgtagaagctcagctcttcttggtcttggctagactgcctagattcccacagcagacaaggttgagaatccattgctggaatcttggtattgatgagttacagtgatggaacatgtgcttggccacaggcaggtccagtcactgcaaaagtgaccaagccagcaggtcacccttaacttcagaaacaattattggtggtgaactgtacttaaattgcagagaaacctgtaagtaatggaaggtaaagaaaaattacagaatggaaaataatattttgggcaagcaaacaaattcactgagaattccaaaagtatattaaaaaagaagatagctatgagttcagatctatcttattggtctttaatattacaaccaatccttaactttccactataaaggaaggattactagattgattactttctggatagataatctggtaataaatgataggtaaatcaaaaattacttttatttaggagtttgaattcttactctcatcagacattttttttctagggacgcttactaattaaatgatttaagttgtttcttaggggttttttgcctatatatttatgactgtgttaatgagtagtgaaatgatgcggaaagacagctatcaggaagaggaaatacagaagcctgaataatctatgggttagaaaagcatccctgaataatcaaaaattggcagtattggcattgttctcaagcctttttatgaaaatgaaatctgaaatcaccaaatgtaaacctgggaacattattctagtgttgctgtcttggattcatgttaagaagcgtcttcattctttgctcatgttgcccacttcttgtggatttgtctgagtgttttttgacaatcacttccttaaagactcttctgaactagttggacctggttaatcatagagagtagcctttaatcatggatagtcttcttggattatttttatatttgaaaagaaaatgttttatttgcactactgagtaggaagagttaattgttttctttgttctttttttgaagtcattacacaggacttcactccagagttaccattatgagtgtgttcagctctggtccacagaggatggataaaaatggtttgttatgtttttttgctctgcagtgctatgagccttatatctgttaatatgaaggacaaagtcaaaagcagcagtggatagcaggaagggtagagactaatatgtttgggaccaaaaccatctaagttagagatttccagatcacagaggggctgggcattctctggagcagtcattggttggtgctttattgtaatcattttgcgccaatccccaacaattaggaactggaccctgggaataagctgagggtgctgaactgttggggaagggtgactgtagccacatggaagataaaatatgggtttttctgcaaaatttccatctgagggtttttacatttaatatttttttaagacagtttaaagagcaaacgttttttaagtgtattctagttgcaaagtatgcacacatatcttgaatggctttatttttattgtgtaaaactgttgaacacatgactgtgatgcacaaattctttacgtgtaaggagtctatgcattttacagtaacttattttatgatcgggtgatgagacagttatactttcaactgccattatttttattaagtgctttcattttctttacagttattataaaattgtatttattttatacagatgggttttcattttcctgatgctgtaatgtttacttcagcttgttgacctttctttgtgttatctgcatgttgtaacgtgtgataagaatgaatgtaaaggctgtggcaactgtaattaatttttgtaaagggctggtcacacgtggatctggtttatgaatgcatttgggatgattttggtaaccagatcaccttttcagaaatttagatgtgaacaccaaaagaagcattttctcaacaaaaattaatagctggttctattttttttaaacctagaaaaaataaagttgatttttttcaattaaagtgcttttaattcttagcagtggggatggggcatgtgtgttttaccagagctatttgggcattaatatctgcaggcaagtacttaaagcacactgtggcagttggatgctgaaggcaaactgaaaaaccaaatgaaaaaacatcagacttccttctttggtttaaaaatatttccccctttctccccattctcccaatccagtggtgtgctggtaaatgtttagcagttcactcttctgggagaaaattatgtattcaactatacatgtttgttataaattttgctgatagcaagaacatataacacaattaacaaataataagatacaaatactttattgtaaatcccatatagccagttgattctcacagtatacttagttgctcaggaaagaactaaaatgcttttttaaaaggatacttaattgctttttgctcaactcctacagtcaacctatgattgattgtctttcaactgtgatttgaaaaatggcagactgtccaaatctaactcatttcccaataaatttattatcattcaatctgatacgtgatctactgttaaaactgtttcttaccatggtacatattagactcattaagccgaaaccacttttagctttaacattaattgtaaatttatatgattcaattttcataaccaatgcttaacaactgcaggcaaaattctaaaatgtgaccactgggtcttgggaatcagtaggggctgtatccagcacaccactgccccatcctttttttcttaactattagtgttgaataaacttctcatagttaatctacttgctgaactcaggaaattcctatcactgaccctggccagggctttaaagggtaggaaaagcattaatgtcagtcctacacagcgaacttttgatttagaagaatgtgacagaaagaaaacatttactgaaatacatgggaagcttgcatatttctaaagttgtctttatacttttcatttctcaaagctaagtaaactgtggtataggcatctctaagatgttagcatttaaaacatcaattgttttattgatgtttaaacaattgtttaaatcccactgaaaaatttaaatattaaaatatcttgcacagtctaccaaatgagttaaatcgttacagtcgtgtctacctcttatttttctatctgtatttaggctgctgttttggtgagattctaatttctttttcccctggaactactttctgtggaagacaaggaacagactggggacagaggcctgaaaacaaattggaagcactcagagatctattgctgaccagccctattcctcatgagttggcggggggaaagccattgtttttaatttccacttaatatgaaaatgcttgtttttaaaatgttttttcctgctgaacaaatgtatttttaaaaggaaaaaaattctcttttggctctaagaagtcagctgtatgagcaggcgtgaccatatcataacatgctgatatgatagaaatcaataaatttttacctctcaggaaaaaaaaaaaaaaaaaaaaa

SEQ ID NO: 37 - DNA, 2803 bp, Homo sapiens
  human ring finger protein 26 (RNF26) cDNA
acacaagatggcggcgcccagcggagtaggggctgcgcttggggtttgctgaagctggctgcctctcccactccccttttgggtgcaaagcgccgctagcgggaagacgggggccgggcggggacaggggcacctgcgtagctggactgagagcctgcgcccagcttacatcgaccccacccggccccggcccgacccgacgcgacccgatccgatccgatcccattccatccgttcctcgtctcctcccggtctgacccgttgcccggccgtggttcgccacaccaggcatccaaagctgaggtcgctcctacggcctgggctcgccttcgctttagagatgtttggcctcttccctcccaaacagcccatcttcaaaacctggactcttggactggcacctggccacctttccctctaccaagactccacttccgtcttacccacttcttcctcagattcttggtaccccctgggttggagactgctcattttccttccaaattaatcccagaccccctaaaatattgacaaccttgacaaccccccaaccgaggagccagactttgttttggactaacttccatagccctatcatggaggcagtgtacctggtagtgaatgggttgggcctggtgctggacgtgctgaccttggtgttggacctcaacttcctgctggtgtcctccctcctggcttccctggcctggctcctggccttcgtctacaacctgccgcacacggtactgactagtcttctgcacttgggccgcggagtcttgctttcattgctggccttgatcgaagccgtggtccggttcacatgtgggggcttgcaggccttgtgtactctgctgtatagctgctgctctggcctagagagcctaaagctcctggggcacctggcctctcatggggcactgcggagcagggagatactgcaccggggcgtcctcaatgtggtctccagtggccatgctttgctgcgccaggcctgtgacatctgtgccattgccatgagcctggtggcttatgtgatcaacagcctggtcaacatctgcctcatcggcactcagaacctcttttccctggtgctggccctgtgggatgcagtgaccgggcctctgtggaggatgacggacgtagtggctgccttcctagcccacatttccagcagtgctgtggccatggccatcctcctttggacaccctgccaactagccctggagctgctggcctcagctgcccgcctcctggccagctttgtgcttgtcaatctcactggcttggtgttgctagcttgtgtgctggcagtgacggtgactgtgttgcatccggacttcaccctgaggctggctacccaggcactcagccagctccatgcccggccatcctaccaccgtcttcgagaggatgtcatgcggctctctcgcctagcactgggctcagaggcctggcgccgagtctggagccgcagtctgcagctggcgagttggccaaaccggggaggggcacctggagctccccagggtgaccctatgagggtattctcagttaggacccggagacaggacactcttcctgaagcggggcgcagatcagaggcagaagaggaggaggccaggaccatcagagtgacacctgtcaggggccgagagaggctcaatgaggaggagcctccaggtgggcaagacccttggaaattgctgaaggagcaagaggagcggaagaagtgtgtcatctgccaggaccagagcaagacagtgttgctcctgccctgccggcatctgtgcctgtgccaggcctgcactgaaatcctgatgcgccaccccgtctaccaccgcaattgcccgctctgccgccggggcatcctgcagaccctcaatgtctacctctgaagcctccttccctgcctgcccacccctccatgctccacgcaggcactcacgctaggacagcattaacacctcatctccgggtcctggtctgaatcccctcctacccctgtggccatcctgccatacatccaggacattgagttggaagactatgatctgggtgggggcaggataacatggcttctctttacccagtgggtcccttcgatgctgagggtggtgagtatgtcactatgcaagggccctgagactatttgctgtgggctctcctccagcctgcccagggcccacccagatgcctctggggttacccctgtctgcttctggtttttctgttggagatctataggtccttttcctgcctccttcacatttcctccccagcttttgcggccacaacacatcagtgtcatttgggtgttttggcaactcaggggccttcggatgatcttaaacctttgtgttcagccagagcccctgtgccctggtaggcgttggggttagtatctctcgggtgccctcagagccacctctgcctgtgatcgtctgatgaggctccctcccaacctgatccaaaagccagtctcaggagtttacccctgggatgggggatgcatctgcacctgactttggggccacgtgccctgtggcaccccagctcactgggagtctcaggagggataaccggatttctgctctttcccctgtcactcccacatcacacagaaaaatggcattcctctctgtctctccctggcatggagagggcagactgtgcacatttcactagggtccaaatacagaagggcccagggcccaggggcttgcagcttcgtgaggggtctctggcccagtttccaatgaataaagttctcttgacagctctgaaaaaaaaaaaaaaaaaa

SEQ ID NO: 38 - DNA, 1374 bp, Homo sapiens
  human gap junction protein, alpha 8, 50kDa (GJA8), connexin 50 cDNA
agcgccaagagagaaagagcacatatttctccgtgggacactccttgtattggtgggtgagaaatgggcgactggagtttcctggggaacatcttggaggaggtgaatgagcactccaccgtcatcggcagagtctggctcaccgtgcttttcatcttccggatcctcatccttggcacggccgcagagttcgtgtggggggatgagcaatccgacttcgtgtgcaacacccagcagcctggctgcgagaacgtctgctacgacgaggcctttcccatctcccacattcgcctctgggtgctgcagatcatcttcgtctccaccccgtccctgatgtacgtggggcacgcggtgcactacgtccgcatggaggagaagcgcaaaagccgcgaggcggaggagctgggccagcaggcggggactaacggcggcccggaccagggcagcgtcaagaagagcagcggcagcaaaggcactaagaagttccggctggaggggaccctgctgaggacctacatctgccacatcatcttcaagaccctctttgaagtgggcttcatcgtgggccactacttcctgtacgggttccggatcctgcctctgtaccgctgcagccggtggccctgccccaatgtggtggactgcttcgtgtcccggcccacggagaaaaccatcttcatcctgttcatgttgtctgtggcctctgtgtccctattcctcaacgtgatggagttgggccacctgggcctgaaggggatccggtctgccttgaagaggcctgtagagcagcccctgggggagattcctgagaaatccctccactccattgctgtctcctccatccagaaagccaagggctatcagctcctagaagaagagaaaatcgtttcccactatttccccttgaccgaggttgggatggtggagaccagcccactgcctgccaagcctttcaatcagttcgaggagaagatcagcacaggacccctgggggacttgtcccggggctaccaagagacactgccttcctacgctcaggtgggggcacaagaagtggagggcgaggggccgcctgcagaggagggagccgaacccgaggtgggagagaagaaggaggaagcagagaggctgaccacggaggagcaggagaaggtggccgtgccagagggggagaaagtagagacccccggagtggataaggagggtgaaaaagaagagccgcagtcggagaaggtgtcaaagcaagggctgccagctgagaagacaccttcactctgtccagagctgacaacagatgatgccagacccctgagcaggctaagcaaagccagcagccgagccaggtcagacgatctaaccgtatgaagtgacgcc

SEQ ID NO: 39 - DNA, 2666 bp, Homo sapiens
  human glypican 2 (GPC2) precursor cDNA
ggcagatgccgcctggtccagctatcgtgctcggtattcagttttccggagcagcgctctttctctggcccgcggagcggtcccgcggccgagtaccggattcccgagtttgggaggctctgctttcctccttaggacccactttgccgtcctggggtggctgcagttatgtccgcgctgcgacctctcctgcttctgctgctgcctctgtgtcccggtcctggtcccggacccgggagcgaggcaaaggtcacccggagttgtgcagagacccggcaggtgctgggggcccggggatatagcttaaacctaatccctcccgccctgatctcaggtgagcacctccgggtctgtccccaggagtacacctgctgttccagtgagacagagcagaggctgatcagggagactgaggccaccttccgaggcctggtggaggacagcggctcctttctggttcacacactggctgccaggcacagaaaatttgatgagttttttctggagatgctctcagtagcccagcactctctgacccagctcttctcccactcctacggccgcctgtatgcccagcacgccctcatattcaatggcctgttctctcggctgcgagacttctatggggaatctggtgaggggttggatgacaccctggcggatttctgggcacagctcctggagagagtgttcccgctgctgcacccacagtacagcttcccccctgactacctgctctgcctctcacgcttggcctcatctaccgatggctctctgcagccctttggggactcaccccgccgcctccgcctgcagataacccggaccctggtggctgcccgagcctttgtgcagggcctggagactggaagaaatgtggtcagcgaagcgcttaaggtgccggtgtctgaaggctgcagccaggctctgatgcgtctcatcggctgtcccctgtgccggggggtcccctcacttatgccctgccagggcttctgcctcaacgtggttcgtggctgtctcagcagcaggggactggagcctgactggggcaactatctggatggtctcctgatcctggctgataagctccagggccccttttcctttgagctgacggccgagtccattggggtgaagatctcggagggtttgatgtacctgcaggaaaacagtgcgaaggtgtccgcccaggtgtttcaggagtgcggcccccccgacccggtgcctgcccgcaaccgtcgagccccgccgccccgggaagaggcgggccggctgtggtcgatggtgaccgaggaggagcggcccacgacggccgcaggcaccaacctgcaccggctggtgtgggagctccgcgagcgtctggcccggatgcggggcttctgggcccggctgtccctgacggtgtgcggagactctcgcatggcagcggacgcctcgctggaggcggcgccctgctggaccggagccgggcggggccggtacttgccgccagtggtcgggggctccccggccgagcaggtcaacaaccccgagctcaaggtggacgcctcgggccccgatgtcccgacacggcggcgtcggctacagctccgggcggccacggccagaatgaaaacggccgcactgggacacgacctggacgggcaggacgcggatgaggatgccagcggctctggagggggacagcagtatgcagatgactggatggctggggctgtggctcccccagcccggcctcctcggcctccataccctcctagaagggatggttctgggggcaaaggaggaggtggcagtgcccgctacaaccagggccggagcaggagtgggggggcatctattggttttcacacccaaaccatcctcattctctccctctcagccctggccctgcttggacctcgataacgggggaggggtgccctagcatcagaagggttcatggccctttcccctcctcccccctcagctgggcctggggaggagtcgaagggggctgcagagagggtagagaagggactttgcaggtgaatggctggggccccaaatccaggagattttcatcagaggtgggtgggtgttcacaatatttattttttcatttggtaatgggaggggggcctgggggtatttatttaggagggagtgtggtttccttagaaggtatagtctccagccctctaaggctggggctggtgatcagccccaacagagaaaatgaggagtttagagttgcagctggggaaggggtttgaaggaagttggaagtggggaggggtgggggcatctggtctcagaaatggaccagctggatgcagggcaggggactgagggtgcttgagtaggatgtgagacttcatgggcctgggttctgttgagttttttcagtatcaatttcttaaaccaaattttaaaaaaaacaaggtgggggggtgctcatctcgtgacctctgccacccacatccttcacaaactccatgtttcagtgtttgagtccatgtttattctgcaaataaatggtaatgtattggaaaaaaaaaaaaaaaaaaaaaaaaaaaaaaaaaaaaaaaaaaaaaaaaaaaaaaaaaaaaaaaaaaaaaaaaaaaaaaaaaaaaaaaaaaaaaaaaaaaaaaaaaaaaaaaaaaaaaaaaaaaaaaaaaaaaaaa

SEQ ID NO: 40 - DNA, 2587 bp, Homo sapiens
  human angiotensinogen  (AGT) (serpin peptidase inhibitor, clade A, member 8 (serpin A8, SERPINA8)) cDNA
atcccatgagcgggcagcagggtcagaagtggcccccgtgttgcctaagcaagactctcccctgccctctgccctctgcacctccggcctgcatgtccctgtggcctcttgggggtacatctcccggggctgggtcagaaggcctgggtggttggcctcaggctgtcacacacctagggagatgctcccgtttctgggaaccttggccccgactcctgcaaacttcggtaaatgtgtaactcgaccctgcaccggctcactctgttcagcagtgaaactctgcatcgatcactaagacttcctggaagaggtcccagcgtgagtgtcgcttctggcatctgtccttctggccagcctgtggtctggccaagtgatgtaaccctcctctccagcctgtgcacaggcagcctgggaacagctccatccccacccctcagctataaatagggcatcgtgacccggccgggggaagaagctgccgttgttctgggtactacagcagaagggtatgcggaagcgagcaccccagtctgagatggctcctgccggtgtgagcctgagggccaccatcctctgcctcctggcctgggctggcctggctgcaggtgaccgggtgtacatacaccccttccacctcgtcatccacaatgagagtacctgtgagcagctggcaaaggccaatgccgggaagcccaaagaccccaccttcatacctgctccaattcaggccaagacatcccctgtggatgaaaaggccctacaggaccagctggtgctagtcgctgcaaaacttgacaccgaagacaagttgagggccgcaatggtcgggatgctggccaacttcttgggcttccgtatatatggcatgcacagtgagctatggggcgtggtccatggggccaccgtcctctccccaacggctgtctttggcaccctggcctctctctatctgggagccttggaccacacagctgacaggctacaggcaatcctgggtgttccttggaaggacaagaactgcacctcccggctggatgcgcacaaggtcctgtctgccctgcaggctgtacagggcctgctagtggcccagggcagggctgatagccaggcccagctgctgctgtccacggtggtgggcgtgttcacagccccaggcctgcacctgaagcagccgtttgtgcagggcctggctctctatacccctgtggtcctcccacgctctctggacttcacagaactggatgttgctgctgagaagattgacaggttcatgcaggctgtgacaggatggaagactggctgctccctgatgggagccagtgtggacagcaccctggctttcaacacctacgtccacttccaagggaagatgaagggcttctccctgctggccgagccccaggagttctgggtggacaacagcacctcagtgtctgttcccatgctctctggcatgggcaccttccagcactggagtgacatccaggacaacttctcggtgactcaagtgcccttcactgagagcgcctgcctgctgctgatccagcctcactatgcctctgacctggacaaggtggagggtctcactttccagcaaaactccctcaactggatgaagaaactatctccccggaccatccacctgaccatgccccaactggtgctgcaaggatcttatgacctgcaggacctgctcgcccaggctgagctgcccgccattctgcacaccgagctgaacctgcaaaaattgagcaatgaccgcatcagggtgggggaggtgctgaacagcattttttttgagcttgaagcggatgagagagagcccacagagtctacccaacagcttaacaagcctgaggtcttggaggtgaccctgaaccgcccattcctgtttgctgtgtatgatcaaagcgccactgccctgcacttcctgggccgcgtggccaacccgctgagcacagcatgaggccagggccccagaacacagtgcctggcaaggcctctgcccctggcctttgaggcaaaggccagcagcagataacaaccccggacaaatcagcgatgtgtcacccccagtctcccaccttttcttctaatgagtcgactttgagctggaaagcagccgtttctccttggtctaagtgtgctgcatggagtgagcagtagaagcctgcagcggcacaaatgcacctcccagtttgctgggtttattttagagaatgggggtggggaggcaagaaccagtgtttagcgcgggactactgttccaaaaagaattccaaccgaccagcttgtttgtgaaacaaaaaagtgttcccttttcaagttgagaacaaaaattgggttttaaaattaaagtatacatttttgcattgccttcggtttgtatttagtgtcttgaatgtaagaacatgacctccgtgtagtgtctgtaataccttagttttttccacagatgcttgtgatttttgaacaatacgtgaaagatgcaagcacctgaatttctgtttgaatgcggaaccatagctggttatttctcccttgtgttagtaataaacgtcttgccacaataagcctccaaaaaaaa

SEQ ID NO: 41 - DNA, 7659 bp, Homo sapiens
  human dynamin 3 (DNM3), transcript variant 1 cNDA
gcgggtcgttagctgtcagagccaagcggcgggctggcggcgggctccgacgtctgcgccaggacctggctggctgagcccggcgcagcagcagcagccagggcagcgcggcccctactccctgtcaggtcgtagaggcgagcagggaccagctggtcgccggcccctcgggcaagatggggaaccgggagatggaggagctgatcccgctggtgaaccgtctgcaggacgcgttttcggcgctgggacagagctgcctgctggagctgccgcagatcgccgtggtgggcggccagagcgccggcaagagctcggtgctcgagaacttcgtgggcagggactttctccctcgagggtcgggcattgtaacaagacgacctcttgtgctgcagcttgttacttctaaagcagaatatgccgagtttctacattgcaaaggaaagaaatttacagattttgatgaagttcgccttgagattgaagcagaaacagatcgcgtgactggaatgaataaaggcatttcctccatacccattaatttacgagtctattccccacacgtgttaaatctaacccttattgatctacctggaataactaaagtgcctgtgggagatcagccaccagatatcgagtatcagatcagagaaatgattatgcagttcatcacgagggagaactgtctgattttagctgttactccagccaacactgatcttgcaaactcagatgcgctgaagctagctaaagaagttgatcctcaaggtctgagaaccattggagttatcaccaaactggaccttatggatgaaggaacggatgccagggatgttctagagaacaaactgttgcctcttcgcaggggttacgtgggggtggtaaacagaagccagaaggacatagatgggaagaaggacataaaggcagccatgctggcagagaggaagtttttcctttcccacccggcttacagacatatcgctgaccgaatgggaaccccacacctgcagaaggtccttaatcagcaacttaccaaccacattcgggataccctaccaaacttcaggaacaaactacagggacagttgctctccatagaacatgaagtagaagcctacaaaaatttcaaaccagaagacccaacaaggaagaccaaagcattgctgcagatggttcagcaatttgctgtggactttgagaagagaattgaagggtcaggggatcaagtagataccctggaactctcaggtggtgctaaaatcaatcgtatttttcatgaacgctttccttttgagatagtaaagatggagttcaatgagaaagaattgcgaagagaaataagctatgcaatcaaaaacatacatggtatcaggacagggttgtttactccagacatggcatttgaagcgatagtcaagaaacagattgtaaagttgaaagggccttccttgaagagtgtggatctggtaatacaagaattaatcaacactgtgaagaagtgtaccaaaaaactggcaaacttccccagactctgcgaggaaacggaaaggattgttgctaaccacattcgtgagcgagaagggaagacaaaggaccaggtattgctattgattgacattcaagtctcttacatcaacaccaaccatgaagacttcattggcttcgcaaatgctcagcagaggagcagtcaggttcacaagaaaaccacagttggaaatcaggtgattcgcaaggggtggctcaccatcagcaacattggcatcatgaaaggcggctcgaagggatactggttcgtccttactgcggaaagcttgtcctggtataaagatgatgaggaaaaagaaaagaagtacatgcttcccttggacaacctgaaagttcgggatgtggaaaagagctttatgtctagcaagcacatctttgcactctttaatacagagcaaaggaatgtatacaaagactatcgcttccttgagctggcatgtgattcccaggaggatgtcgacagctggaaggcatctctactaagagctggggtctatcctgacaaatctgtagggaacaacaaagctgaaaatgatgagaatggacaagcagaaaacttttccatggacccacaattggagaggcaagtggagaccattcgcaacctcgtagactcctacatgtccattatcaacaaatgtatccgagatctaattccaaaaacaataatgcaccttatgatcaataacgttaaagatttcataaattccgagctcctagcacagttgtattcttcagaggaccaaaataccctgatggaggaatctgctgagcaggctcagcgccgggatgagatgcttcgaatgtatcaagcactgaaagaagcccttgggataattggggacatcagcacagccaccgtgtccactccggcaccccctccagtggatgactcctggatacagcactctcgcaggtcacctcctccaagccccacaacccaaaggaggccaacactaagtgctcccctcgcaaggcccacatccggccgaggaccagctcctgccattccctctcctggcccccactctggggctcctccagtcccattccgtccaggcccattacctcctttccccagcagcagtgactccttcggagcccctccacaagttccatctaggcctacgagggccccgcccagtgtcccaagccggagaccacccccatcaccaactcgtcccactataatccgcccactagaatcctccctgttagactaaacgaagtgtctggcatggcaattaatcactaatgaattatgcgaaagcaacatatttgataaccgttgcagtaaatcatgagtagtcgcatgtgtggacatcagtaggcaagtaaccagttttactaatgcattcatcgctcatcttcattgctcatggtatgtcaaacctttggggtttgactcagaaactgctaaccttttagaggctttatatgttgtactgaccaaggtaggtttgtatagcagccctatactttggggatcatttgcctaccatggcatatatttgaaattgctttggacaagttttctaggctatctaccaggtagctcattaaacgtaattcttcagatatgagatagtgggcttagacctaagccatacatatttcttttcccacattctgtttaggatgacagtaattctgttgtctaccattaatgctactacctactccataattgcctatttagctcctcttttcttcctttttatttcataagactgctaggaagtgattttttaaaattaggactccttaagaataaacttttccagaagcacgaggtagtttgcaaaggaaaagtctgcactgtttgctctaaagagcttctcctcattccaatgtgttttgcttcatgctagaagcatatgcaacagtgaataaaagcttctttttttgttaatcagtcaataaatttggctaattagtttcagagttcaaggaagaagcaaaatatcacatctctagaagtgttgggaaaaatataatttctttctttacttatattcacctcatggtaggttatattgaaggctgacatggagaatgtttacttttctatttggcatagctaactacactttgatactaactccagttttactattattattttggttggaaaaaaaattcactctttacgtgctaatttgtaatcttgttttgtaagaatttatcctacccttgaaacaggctcagtgtaactgtatatccattctaggctttcttaataaatcttgaggctatgggataatcacatttaaagaatggttcctgaaatgaagtcagtagaaatggcatgggataagagcagagctcacacttttacagttgcagtatttcaaagtccctatccaggtcactccagaaaagggtattgaaacgttgaaatctaaagcaaatttgcaatttcttaagatttctaaaatttaccagaacagtttagcctgggggttaatagttaagtcttgaggctaagttttggactaccaaggaccagatgattcacatgtaggaaacagccagaagccaactggaattttgtgtgctaactgttcccagacagcagagcaagtattcactgagtaggggtgtcccatgacactatttcatattctacagaagtaaatcaggtttcaccaactgaaatgtctccctttgaaagtagcaaacatgatttgtatgttaacttaactttaatttcctgtgtagtttacacccagagcagatactcataaagtataaagtaaaaacttttaaccattattaaacagagaacttgccatgttgagtgccattgtattgaacttattctaaaggcttatgctaacccatttataattggtaaaaatcagaaaatacaagatttacataaaggtcatttcaacttttaaggttaccagtgattgtataaaaacatcacaatcctaaatcctctcgtatctcaccccaaaccccaaactgggggaaaaaaagttaactctttgtgaatggaaccaatgtgcaagatacatactgcatttttaaaatagtgtctcagctaaatggaaaactgttaagcaaacatccatagtaaaacaaataatcttcagtgagatctttttataaaacttcttgtttttaggattccctttgcttcttcctttgaattctctaaaataggcagctaacggattatatacttcagggtttggctttgtgctaaatgtggttttgtgttttgctgtatttcaaaattttccttctgttaaaggaaaatattgtgaataaccactggtgtgttcttagatcagcacaaaccatgtcaaaaaaaattggagatttttttccaattttccttccactgatcttaggcagtaataaacaatggcatttgtcatctttggcacttgcttttagattatagtcccacagttgcactgccccaattgtctacctttgtgggtacatttttgttctttactcctaagttatttctcatagaacccagcctactctagaatttcagcagtgacattggagaatatttttaatttgctgcagtactatgtcatattattagtatgaatctcatttcccaaagggtttgtattctgctaaaaggagatgccaatgttgaatgaagtctgaaactctagtatgtgcatagtttgacgtgcagcatgcacaccaggccttaagatgggaatgtagcttaatgattttctgtttcccataccatttctaatcttttgtgtaattttctcttaactgattgctctgatattgtaaacacaatagatgtagctctatcatgtctagcataatttaaaaaatcagtgtttttaggatttgggaaaataaactgtaaatgtttatttgataggtaaatatagttttattgtcacatgctaaatattgcatgcatattgactaattggaataaccatttactcaattatggacagcttattgaaatagtattgatttagaaaaagtatattgcatttctaaaaaacatctaccaaggttactcgtctgaatattgcttttagccgtgttttataacatagacgagcagtagggtctgtttattagcaaatttcctatttgttccaatacaaactcactttattctaaagtatattaatgaaaccagttcctgtgatgtaactgtaagccttctcgacttagacttaaaaagtggtcacatagattaattttgtgactttttagtatagactgtagccataattctcaaatatgaaatgggacctaataccagtatgtgataaatgttgatgttttctgtgtacaaacacattttctatgcatgtgtctctgtgtatatggcatatacctagtaagtatgtttctgtaagtatgtgtattttatgtccatttgagtaggtaggtaggttttaaaaatactagttaaaatgccacaagcatgagtgtgattgtatgtgcactgtgtgtatatatataaatatatgtatatgtatggttgtaaatatctatgtatacatgtacttagtatgtgtggtatcaggatattttttaaactgtgataatacaacagatagctttgaatgatctgccataacatgtggtaacaatagttcatttctcataacatatatgaggtatacaaaattttctaactccagattgtagtcattttgagaggtacaaagctcataattaccatgacaacatggtaatgtccatagacatttgtatctgaatccacaagaagatctgaatctaagaaggaattacctttgacaatatttttcggtaagaagtaaaacctctggagacctatctttaagatctctaattggaattataaattatttttggattgctgagctgaatcttaaaaagccaagttgatatacatagtcatttttcctctatggtagaagtaaaaaaaaaaaaaaaggacatagcaacattaaagtagtggatttttctgagtaaatttgctgaaaatataagagagaagctatctaataccttggaggtaggtcatccactttttcaggtaaacatttttcatttggcaaatggcataattatttgaaagtgacaggaatctcctcagaatgaagaataaagcctactaggtctctaactgttgaactcatgaaagaagatagtgtatgagacttaagccatgagttttgtatcatttcaattagaagactactagctgtgagctcagagtttaatgtaaatgaatctagatgattttgaagaaatgattattcgttcaccagatcactcattgtacattctaaaaagctcaaatgagtcttctagatactcttactcatcctgtctggttgctatgtttaaaattatgtggtgctgtgtaggtgaaactttaagaatatttttgaagcatatgtaatatatgcactgctatttgtgtgtgtgtgtgtgtctttgtatatatgtaagaatgtgtgtatgtgtgagagcaagagagaggaaactcaaagaggagtgtttgtcttaagacctgttcatactggtatattggtgagacttctcacttctggttggaggtttcacatatggctcaactcaagtcattaatctctttttaatttttactcttgaattccttaaacttcgctcattatgaaatgttttaaaattatgacaaaaattactctgtctaaccacttgccttgtctgctaccagtttgttaaaaattattccccccaaccagtaattccaccagtactacttgatttgtgttatatttcctatgtacatgtacagcctttgttttgcttgcttgtctatttttactttcccttttttgggtcaaatttttcttttgctttgtttgaagaaggaatatacagaagtaaaatcttgtcttctctgctgattctttaattaatatgagccggatactttccactgtcttcttggcactttcaggatttcttaatgctgatatatggactcttagaatggaatttttgaagaaaaatctcaaagcctgtatcgttcttgaaggtcacatgtacctattgtgaaaatgtgaagctgtatttctgaagctgaaataaattataacatttgaaggaaaaaaaaaaaaaaaa

SEQ ID NO: 42 - DNA, 7647 bp, Homo sapiens
  human dynamin 3 (DNM3), transcript variant 2 cDNA
gcgggtcgttagctgtcagagccaagcggcgggctggcggcgggctccgacgtctgcgccaggacctggctggctgagcccggcgcagcagcagcagccagggcagcgcggcccctactccctgtcaggtcgtagaggcgagcagggaccagctggtcgccggcccctcgggcaagatggggaaccgggagatggaggagctgatcccgctggtgaaccgtctgcaggacgcgttttcggcgctgggacagagctgcctgctggagctgccgcagatcgccgtggtgggcggccagagcgccggcaagagctcggtgctcgagaacttcgtgggcagggactttctccctcgagggtcgggcattgtaacaagacgacctcttgtgctgcagcttgttacttctaaagcagaatatgccgagtttctacattgcaaaggaaagaaatttacagattttgatgaagttcgccttgagattgaagcagaaacagatcgcgtgactggaatgaataaaggcatttcctccatacccattaatttacgagtctattccccacacgtgttaaatctaacccttattgatctacctggaataactaaagtgcctgtgggagatcagccaccagatatcgagtatcagatcagagaaatgattatgcagttcatcacgagggagaactgtctgattttagctgttactccagccaacactgatcttgcaaactcagatgcgctgaagctagctaaagaagttgatcctcaaggtctgagaaccattggagttatcaccaaactggaccttatggatgaaggaacggatgccagggatgttctagagaacaaactgttgcctcttcgcaggggttacgtgggggtggtaaacagaagccagaaggacatagatgggaagaaggacataaaggcagccatgctggcagagaggaagtttttcctttcccacccggcttacagacatatcgctgaccgaatgggaaccccacacctgcagaaggtccttaatcagcaacttaccaaccacattcgggataccctaccaaacttcaggaacaaactacagggacagttgctctccatagaacatgaagtagaagcctacaaaaatttcaaaccagaagacccaacaaggaagaccaaagcattgctgcagatggttcagcaatttgctgtggactttgagaagagaattgaagggtcaggggatcaagtagataccctggaactctcaggtggtgctaaaatcaatcgtatttttcatgaacgctttccttttgagatagtaaagatggagttcaatgagaaagaattgcgaagagaaataagctatgcaatcaaaaacatacatggtatcaggacagggttgtttactccagacatggcatttgaagcgatagtcaagaaacagattgtaaagttgaaagggccttccttgaagagtgtggatctggtaatacaagaattaatcaacactgtgaagaagtgtaccaaaaaactggcaaacttccccagactctgcgaggaaacggaaaggattgttgctaaccacattcgtgagcgagaagggaagacaaaggaccaggtattgctattgattgacattcaagtctcttacatcaacaccaaccatgaagacttcattggcttcgcaaatgctcagcagaggagcagtcaggttcacaagaaaaccacagttggaaatcaggtgattcgcaaggggtggctcaccatcagcaacattggcatcatgaaaggcggctcgaagggatactggttcgtccttactgcggaaagcttgtcctggtataaagatgatgaggaaaaagaaaagaagtacatgcttcccttggacaacctgaaagttcgggatgtggaaaagagctttatgtctagcaagcacatctttgcactctttaatacagagcaaaggaatgtatacaaagactatcgcttccttgagctggcatgtgattcccaggaggatgtcgacagctggaaggcatctctactaagagctggggtctatcctgacaaatctgtagctgaaaatgatgagaatggacaagcagaaaacttttccatggacccacaattggagaggcaagtggagaccattcgcaacctcgtagactcctacatgtccattatcaacaaatgtatccgagatctaattccaaaaacaataatgcaccttatgatcaataacgttaaagatttcataaattccgagctcctagcacagttgtattcttcagaggaccaaaataccctgatggaggaatctgctgagcaggctcagcgccgggatgagatgcttcgaatgtatcaagcactgaaagaagcccttgggataattggggacatcagcacagccaccgtgtccactccggcaccccctccagtggatgactcctggatacagcactctcgcaggtcacctcctccaagccccacaacccaaaggaggccaacactaagtgctcccctcgcaaggcccacatccggccgaggaccagctcctgccattccctctcctggcccccactctggggctcctccagtcccattccgtccaggcccattacctcctttccccagcagcagtgactccttcggagcccctccacaagttccatctaggcctacgagggccccgcccagtgtcccaagccggagaccacccccatcaccaactcgtcccactataatccgcccactagaatcctccctgttagactaaacgaagtgtctggcatggcaattaatcactaatgaattatgcgaaagcaacatatttgataaccgttgcagtaaatcatgagtagtcgcatgtgtggacatcagtaggcaagtaaccagttttactaatgcattcatcgctcatcttcattgctcatggtatgtcaaacctttggggtttgactcagaaactgctaaccttttagaggctttatatgttgtactgaccaaggtaggtttgtatagcagccctatactttggggatcatttgcctaccatggcatatatttgaaattgctttggacaagttttctaggctatctaccaggtagctcattaaacgtaattcttcagatatgagatagtgggcttagacctaagccatacatatttcttttcccacattctgtttaggatgacagtaattctgttgtctaccattaatgctactacctactccataattgcctatttagctcctcttttcttcctttttatttcataagactgctaggaagtgattttttaaaattaggactccttaagaataaacttttccagaagcacgaggtagtttgcaaaggaaaagtctgcactgtttgctctaaagagcttctcctcattccaatgtgttttgcttcatgctagaagcatatgcaacagtgaataaaagcttctttttttgttaatcagtcaataaatttggctaattagtttcagagttcaaggaagaagcaaaatatcacatctctagaagtgttgggaaaaatataatttctttctttacttatattcacctcatggtaggttatattgaaggctgacatggagaatgtttacttttctatttggcatagctaactacactttgatactaactccagttttactattattattttggttggaaaaaaaattcactctttacgtgctaatttgtaatcttgttttgtaagaatttatcctacccttgaaacaggctcagtgtaactgtatatccattctaggctttcttaataaatcttgaggctatgggataatcacatttaaagaatggttcctgaaatgaagtcagtagaaatggcatgggataagagcagagctcacacttttacagttgcagtatttcaaagtccctatccaggtcactccagaaaagggtattgaaacgttgaaatctaaagcaaatttgcaatttcttaagatttctaaaatttaccagaacagtttagcctgggggttaatagttaagtcttgaggctaagttttggactaccaaggaccagatgattcacatgtaggaaacagccagaagccaactggaattttgtgtgctaactgttcccagacagcagagcaagtattcactgagtaggggtgtcccatgacactatttcatattctacagaagtaaatcaggtttcaccaactgaaatgtctccctttgaaagtagcaaacatgatttgtatgttaacttaactttaatttcctgtgtagtttacacccagagcagatactcataaagtataaagtaaaaacttttaaccattattaaacagagaacttgccatgttgagtgccattgtattgaacttattctaaaggcttatgctaacccatttataattggtaaaaatcagaaaatacaagatttacataaaggtcatttcaacttttaaggttaccagtgattgtataaaaacatcacaatcctaaatcctctcgtatctcaccccaaaccccaaactgggggaaaaaaagttaactctttgtgaatggaaccaatgtgcaagatacatactgcatttttaaaatagtgtctcagctaaatggaaaactgttaagcaaacatccatagtaaaacaaataatcttcagtgagatctttttataaaacttcttgtttttaggattccctttgcttcttcctttgaattctctaaaataggcagctaacggattatatacttcagggtttggctttgtgctaaatgtggttttgtgttttgctgtatttcaaaattttccttctgttaaaggaaaatattgtgaataaccactggtgtgttcttagatcagcacaaaccatgtcaaaaaaaattggagatttttttccaattttccttccactgatcttaggcagtaataaacaatggcatttgtcatctttggcacttgcttttagattatagtcccacagttgcactgccccaattgtctacctttgtgggtacatttttgttctttactcctaagttatttctcatagaacccagcctactctagaatttcagcagtgacattggagaatatttttaatttgctgcagtactatgtcatattattagtatgaatctcatttcccaaagggtttgtattctgctaaaaggagatgccaatgttgaatgaagtctgaaactctagtatgtgcatagtttgacgtgcagcatgcacaccaggccttaagatgggaatgtagcttaatgattttctgtttcccataccatttctaatcttttgtgtaattttctcttaactgattgctctgatattgtaaacacaatagatgtagctctatcatgtctagcataatttaaaaaatcagtgtttttaggatttgggaaaataaactgtaaatgtttatttgataggtaaatatagttttattgtcacatgctaaatattgcatgcatattgactaattggaataaccatttactcaattatggacagcttattgaaatagtattgatttagaaaaagtatattgcatttctaaaaaacatctaccaaggttactcgtctgaatattgcttttagccgtgttttataacatagacgagcagtagggtctgtttattagcaaatttcctatttgttccaatacaaactcactttattctaaagtatattaatgaaaccagttcctgtgatgtaactgtaagccttctcgacttagacttaaaaagtggtcacatagattaattttgtgactttttagtatagactgtagccataattctcaaatatgaaatgggacctaataccagtatgtgataaatgttgatgttttctgtgtacaaacacattttctatgcatgtgtctctgtgtatatggcatatacctagtaagtatgtttctgtaagtatgtgtattttatgtccatttgagtaggtaggtaggttttaaaaatactagttaaaatgccacaagcatgagtgtgattgtatgtgcactgtgtgtatatatataaatatatgtatatgtatggttgtaaatatctatgtatacatgtacttagtatgtgtggtatcaggatattttttaaactgtgataatacaacagatagctttgaatgatctgccataacatgtggtaacaatagttcatttctcataacatatatgaggtatacaaaattttctaactccagattgtagtcattttgagaggtacaaagctcataattaccatgacaacatggtaatgtccatagacatttgtatctgaatccacaagaagatctgaatctaagaaggaattacctttgacaatatttttcggtaagaagtaaaacctctggagacctatctttaagatctctaattggaattataaattatttttggattgctgagctgaatcttaaaaagccaagttgatatacatagtcatttttcctctatggtagaagtaaaaaaaaaaaaaaaggacatagcaacattaaagtagtggatttttctgagtaaatttgctgaaaatataagagagaagctatctaataccttggaggtaggtcatccactttttcaggtaaacatttttcatttggcaaatggcataattatttgaaagtgacaggaatctcctcagaatgaagaataaagcctactaggtctctaactgttgaactcatgaaagaagatagtgtatgagacttaagccatgagttttgtatcatttcaattagaagactactagctgtgagctcagagtttaatgtaaatgaatctagatgattttgaagaaatgattattcgttcaccagatcactcattgtacattctaaaaagctcaaatgagtcttctagatactcttactcatcctgtctggttgctatgtttaaaattatgtggtgctgtgtaggtgaaactttaagaatatttttgaagcatatgtaatatatgcactgctatttgtgtgtgtgtgtgtgtctttgtatatatgtaagaatgtgtgtatgtgtgagagcaagagagaggaaactcaaagaggagtgtttgtcttaagacctgttcatactggtatattggtgagacttctcacttctggttggaggtttcacatatggctcaactcaagtcattaatctctttttaatttttactcttgaattccttaaacttcgctcattatgaaatgttttaaaattatgacaaaaattactctgtctaaccacttgccttgtctgctaccagtttgttaaaaattattccccccaaccagtaattccaccagtactacttgatttgtgttatatttcctatgtacatgtacagcctttgttttgcttgcttgtctatttttactttcccttttttgggtcaaatttttcttttgctttgtttgaagaaggaatatacagaagtaaaatcttgtcttctctgctgattctttaattaatatgagccggatactttccactgtcttcttggcactttcaggatttcttaatgctgatatatggactcttagaatggaatttttgaagaaaaatctcaaagcctgtatcgttcttgaaggtcacatgtacctattgtgaaaatgtgaagctgtatttctgaagctgaaataaattataacatttgaaggaaaaaaaaaaaaaaaa

SEQ ID NO: 43 - DNA, 480 bp, Homo sapiens
  human hypothetical LOC644083 protein (LOC644083) cDNA
atgttcaaatttaaactcttagggaatttctatatttgtatacagaatccaaattcccttctcttttctcttccaggagagattccgagcccaccccttgcctgcctccgagacctcaacaccatcctgcttactaaagggagcccagtttttcccgctacccatggcacaggtcttcgtcaatttcagtgtgcccttcatgaatctggcatgtggtcactggcagttaaagggggtgatgatggagaggagaaaccccaggctccaactacaaaaccctgcgggacacgcaggctcctctgggcttcccggcccacattcctggcctatttcaaacatcagggaagcagactgagcgtgccatgccctcctcaagtatttttaacctgtttccaaaaccagacatgttctaaggggggcgacccaggaattcctcatccagggccagtgcctgccaaccgcgagatgttggctttctaa

SEQ ID NO: 44 - DNA, 480 bp, Homo sapiens; identical to SEQ ID NO: 43
  human hypothetical LOC644083 protein (LOC644083) cDNA

SEQ ID NO: 45 - DNA, 1235 bp, Homo sapiens
  human ribosomal RNA processing 7 homolog A (S. cerevisiae) (RRP7A) cDNA
gctcccgggtggcaagatggtggcgcgcaggaggaagtgcgccgcgcgggacccggaggaccgtatccccagcccactgggctacgcagctattccaatcaagttctctgaaaagcaacaggcttctcactacctctatgtgagagcacacggcgttcgacaaggcaccaagtccacctggcctcagaagaggactctttttgtcctcaatgtgcccccatactgcacagaggagagcctgtcccgcctcctgtccacctgtggcctcgtccagtctgtagagttgcaggagaagccggacctggctgagagcccaaaggagtcaaggtcgaagttttttcatcccaagccagttccgggtttccaggtagcctatgtggtgttccagaagccaagtggggtgtcagcggccttggccctgaagggccccctgctggtgtccacagagagccaccctgtgaagagtggcattcacaagtggatcagtgactacgcagactctgtgcccgaccctgaggccctgagggtggaagtggacacgttcatggaggcatatgaccagaagatcgctgaggaagaagctaaggccaaggaggaggagggggtccctgacgaggagggctgggtgaaggtgacccgccggggccggcggcctgtgctcccccggactgaggcagccagcttgcgggtgctggagagggagagacggaagcgcagccgaaaagagctgctcaacttctacgcctggcagcatcgagagagcaagatggagcatctagcgcagctgcgcaagaagttcgaggaggacaagcagaggatcgagctgctgcgggcccagcgcaaattccgaccgtactgagctgtgagagccgcagtgaatggctggaggtgcagggccaggaggaggcgaggcagggcctgcagcggtctctgagaggccgagctctggccaacgggccccaggttgaaggccaccgcgtccaacagccccatcagagtccacacaggccaggagggaaggaccaggccacccctcgggtcttgtgcttcagcagtcctggggacccaggcgtgccgagaggaggacttgtccttcctgcttcttgcctccacaccctcctctccaggaccctggatgaatccgttctgtgcttccttttccctcaatgcaaaagcccttgctggcaacgaaaaagcctcaaaagaaaaaaaaaaaaaaaaaaaaaaaaaaaaaa

SEQ ID NO: 46 - DNA, 3839 bp, Homo sapiens
  human ankyrin repeat domain 5 (ANKRD5) transcript variant 1, ankyrin repeat domain protein 5 cDNA
ccccgccccctgcgctcacctgcccgcgcgctcgccttccggggacccggggcccatggacacatacacccagccctgctgtcccgcgcgccagctcaccagccctacccaagggacatcattcacgcctgggcgcctccgccgggctccgggagcccaaggtcgcggctgggccagcgctgagcgtcagaggacgagagcaggggcctccccggtcgccccagcaggcccaggcacataggtgcccagagatccctggcttctgatcgcccggaagactaagagtcccatgaagtgggcaccattgctattgccagttcacagatgcagaaactgaggtaaaaactagctttagttttggtccagaaagcattttcaaggagctggtcaagcatggctttagcagataagagacttgagaacttacagatctacaaagttcttcaatgtgtgcggaacaaagacaagaagcagatagagaagctgaccaagcttggataccctgaactaatcaattatacagaacccattaatggacttagtgctttgcacttagcctcagtttccaatgatattgatatggtcagctttctccttgaccttggtgctcaccctgatgtgcaagaccgaatgggctgtactcccacaatgagggctgcagaactgggccatgaattgtcaatggaaatattagcaaaggcaaaggctgatatgactatagttgataatgaaggaaaaggtgttttgttttactgcattttaccgactaagcggcattatcgctgtgctctgatcgcccttgaacatggtgcagatgtcaacaattctacctatgaaggaaagccaatattccttagagcttgtgaagatgcacatgatgttaaagatgtgtgcctgacatttttggaaaaaggagccaatcctaatgcaatcaactcatccacaggccgcacagctttaatggaagcgtcaagagaaggggtagtggaaatagttcgaggcatattggaaagaggaggtgaagtgaatgcatttgacaacgacaggcatcacgctgctcattttgctgctaaaggaggctttttcgatatattgaagcttctttttgcctacaatggagacgtggggctgatttcgataaatgggaacacaccacttcattatgctgccatgggtggttttgcagactgctgtaaatatatagctcagcgaggatgtgacctgaaatggaagaatttagatcataaaacgcccagggctgtggctaaggaaggcggcttcaaagcagcaagcaaagaaatacgccgagcagagagaatcgctaataaactagccaggccaggagccaaaaatccaaatccactgtgggcccttagactgcacgattggtccgtagaacgtgaggctttcctccgggaagcctttgcggttttagacaggggtgatggaagcatcagcaagaacgacttcgtgatggtgttggaggaaaggcaggattatgcaagctcagaacagctggctgccatcgctcaccttcatgagaaaacccggggaggaggggtcaatattaatgaattctttaaaggaaccagatatttaaacaagtcttttgtcttaggatcgtatggacctaagaaaaaggaaaaagggatgggcaaaaaaggaaagaaagggaaatttgtcttaccccttccaatctgtgtcattcctgagtacgcgtttccacgccggcaggatggtgggccaccgtattacatgattgagacctacaagaatgtcactgatagcagccggtttaatagagatcatcccccagaacatcccattcaggatgactctgtttggtacattgatgattcagagaaggtattttcaaacattaatattatcaccaaagcaggggatctggcttctctgaaaaaggcctttgaatcaggaatacctgtggatatgaaggataattattacaaaactccgctaatgacggcgtgtgcaagtggaaacatagatgtggtcaagtttcttcttgaaaaaggagctaacgttaatgcaacagataactttctgtggactccacttcattttgcatgccatgcaggccaacaagacattgttgagcttcttgttgaatctggagctttaatagatgcagcttcaatcaacaactcaactcctttaaatagagccattgaaagctgcagactggatacagtaaaatacctacttgatattggtgctaaattccagctggaaaatagaaaagggcatagtgccatggacgttgcaaaggcatatgctgattatagaataattgatctgattaaagaaaagctagataacttgccgaaaccagcagaaaatcaaaaactaaaaggcaagacacctcctatactgaagactgaaggccctgaaattaagaaagaagaggaactgctgtcatcaatttatggtgtaccaaccacatcagagggaaagaaagtacagaagggtaatgtggttcatctgaattcattgattaccagtggttatactaagaaagtggatatcacatttattccacggaggatttggagtcctgaagccacaacagcagagctgatcaggaagagggaactacggcgagagaggtttacacatgaggtggacttcgacgattttatgatgccttttcagaagaacatcacagagaaagctcgagcactggaagctgccttgaagacctaagtcatagcagttatttcttggggtaaatgctttgaggcccagggaccaatctttggagaaagtagatatttccatcaaagccaaagcaatccatacaccaagaacttgttaccaagaatttctttttgctttaacaactataaatattcttagctgtctagagaaaagatgtatgttattttgaaatgaatggtatgtcattctggataaatccccaagcccctttatgaatgtagtgaaatacatggcatgtgggttataaacgttgctgtcaaaagatttaccaggtctacaccattatgcttattatttttttaattatcctttttatttattaaatagagacagagtctcactatattgccccagctggtctcgaactcttgagctcaggcagtcctcccaacttggccgtcgaaagtgctgggattataggcatgagctactgtgcccagcctgcttattgaagatacatttctagtggaaattgatgaaacaatttaggttttggaaaaagaagtaatatttaatcttttaaggaaggagtttatttctcacatgccattataaactatgtgtattagataccttgggttgaatacacttttaacagccctagatcgatagccctagccctagatagatagccctagccctagatagatagctattaggttggtgcaaaagtaattgtggtttttgccataacctttaattgcagcaaaaactgcaattacttttgctccaacctgacagctaggtatctagctagctagaaaggcagatagacagatatatagatgatagatagatagatgatagatagatagatagatgatagatagatagatagatagatagatagatagatagatagagatttattgcaaataattggtttacataattttgggccccagatggttaagtgctaaatttgtagggtaggctatcaggaagtgcaggctggaaacatgcaggagctgtccctgaagtccacaagtggaatttcttcttcatcatggaaacctcagttttgttcatacacctaaatacttcagtatgtctttcctaaaataaaaggcatccatttacctaaaaaaaaaaaaaaaaaa

SEQ ID NO: 47 - DNA, 3775 bp, Homo sapiens
  human ankyrin repeat domain 5 (ANKRD5), transcript variant 2, ankyrin repeat domain protein 5 cDNA
ccccgccccctgcgctcacctgcccgcgcgctcgccttccggggacccggggcccatggacacatacacccagccctgctgtcccgcgcgccagctcaccagccctacccaagggacatcattcacgcctgggcgcctccgccgggctccgggagcccaaggtcgcggctgggccagcgctgagcgtcagaggacgagagcaggggcctccccggtcgccccagcaggcccaggcacataggtgcccagagatccctggcttctgatcgcccggaagactaagagctttagttttggtccagaaagcattttcaaggagctggtcaagcatggctttagcagataagagacttgagaacttacagatctacaaagttcttcaatgtgtgcggaacaaagacaagaagcagatagagaagctgaccaagcttggataccctgaactaatcaattatacagaacccattaatggacttagtgctttgcacttagcctcagtttccaatgatattgatatggtcagctttctccttgaccttggtgctcaccctgatgtgcaagaccgaatgggctgtactcccacaatgagggctgcagaactgggccatgaattgtcaatggaaatattagcaaaggcaaaggctgatatgactatagttgataatgaaggaaaaggtgttttgttttactgcattttaccgactaagcggcattatcgctgtgctctgatcgcccttgaacatggtgcagatgtcaacaattctacctatgaaggaaagccaatattccttagagcttgtgaagatgcacatgatgttaaagatgtgtgcctgacatttttggaaaaaggagccaatcctaatgcaatcaactcatccacaggccgcacagctttaatggaagcgtcaagagaaggggtagtggaaatagttcgaggcatattggaaagaggaggtgaagtgaatgcatttgacaacgacaggcatcacgctgctcattttgctgctaaaggaggctttttcgatatattgaagcttctttttgcctacaatggagacgtggggctgatttcgataaatgggaacacaccacttcattatgctgccatgggtggttttgcagactgctgtaaatatatagctcagcgaggatgtgacctgaaatggaagaatttagatcataaaacgcccagggctgtggctaaggaaggcggcttcaaagcagcaagcaaagaaatacgccgagcagagagaatcgctaataaactagccaggccaggagccaaaaatccaaatccactgtgggcccttagactgcacgattggtccgtagaacgtgaggctttcctccgggaagcctttgcggttttagacaggggtgatggaagcatcagcaagaacgacttcgtgatggtgttggaggaaaggcaggattatgcaagctcagaacagctggctgccatcgctcaccttcatgagaaaacccggggaggaggggtcaatattaatgaattctttaaaggaaccagatatttaaacaagtcttttgtcttaggatcgtatggacctaagaaaaaggaaaaagggatgggcaaaaaaggaaagaaagggaaatttgtcttaccccttccaatctgtgtcattcctgagtacgcgtttccacgccggcaggatggtgggccaccgtattacatgattgagacctacaagaatgtcactgatagcagccggtttaatagagatcatcccccagaacatcccattcaggatgactctgtttggtacattgatgattcagagaaggtattttcaaacattaatattatcaccaaagcaggggatctggcttctctgaaaaaggcctttgaatcaggaatacctgtggatatgaaggataattattacaaaactccgctaatgacggcgtgtgcaagtggaaacatagatgtggtcaagtttcttcttgaaaaaggagctaacgttaatgcaacagataactttctgtggactccacttcattttgcatgccatgcaggccaacaagacattgttgagcttcttgttgaatctggagctttaatagatgcagcttcaatcaacaactcaactcctttaaatagagccattgaaagctgcagactggatacagtaaaatacctacttgatattggtgctaaattccagctggaaaatagaaaagggcatagtgccatggacgttgcaaaggcatatgctgattatagaataattgatctgattaaagaaaagctagataacttgccgaaaccagcagaaaatcaaaaactaaaaggcaagacacctcctatactgaagactgaaggccctgaaattaagaaagaagaggaactgctgtcatcaatttatggtgtaccaaccacatcagagggaaagaaagtacagaagggtaatgtggttcatctgaattcattgattaccagtggttatactaagaaagtggatatcacatttattccacggaggatttggagtcctgaagccacaacagcagagctgatcaggaagagggaactacggcgagagaggtttacacatgaggtggacttcgacgattttatgatgccttttcagaagaacatcacagagaaagctcgagcactggaagctgccttgaagacctaagtcatagcagttatttcttggggtaaatgctttgaggcccagggaccaatctttggagaaagtagatatttccatcaaagccaaagcaatccatacaccaagaacttgttaccaagaatttctttttgctttaacaactataaatattcttagctgtctagagaaaagatgtatgttattttgaaatgaatggtatgtcattctggataaatccccaagcccctttatgaatgtagtgaaatacatggcatgtgggttataaacgttgctgtcaaaagatttaccaggtctacaccattatgcttattatttttttaattatcctttttatttattaaatagagacagagtctcactatattgccccagctggtctcgaactcttgagctcaggcagtcctcccaacttggccgtcgaaagtgctgggattataggcatgagctactgtgcccagcctgcttattgaagatacatttctagtggaaattgatgaaacaatttaggttttggaaaaagaagtaatatttaatcttttaaggaaggagtttatttctcacatgccattataaactatgtgtattagataccttgggttgaatacacttttaacagccctagatcgatagccctagccctagatagatagccctagccctagatagatagctattaggttggtgcaaaagtaattgtggtttttgccataacctttaattgcagcaaaaactgcaattacttttgctccaacctgacagctaggtatctagctagctagaaaggcagatagacagatatatagatgatagatagatagatgatagatagatagatagatgatagatagatagatagatagatagatagatagatagatagagatttattgcaaataattggtttacataattttgggccccagatggttaagtgctaaatttgtagggtaggctatcaggaagtgcaggctggaaacatgcaggagctgtccctgaagtccacaagtggaatttcttcttcatcatggaaacctcagttttgttcatacacctaaatacttcagtatgtctttcctaaaataaaaggcatccatttacctaaaaaaaaaaaaaaaaaa

SEQ ID NO: 48 - DNA, 2793 bp, Homo sapiens
  human glycoprotein A33 (transmembrane) (GPA33) precursor cDNA
ctacccctttgtgagcagtctaggactttgtacacctgttaagtagggagaaggcaggggaggtggctggtttaaggggaacttgagggaagtagggaagactcctcttgggacctttggagtaggtgacacatgagcccagccccagctcacctgccaatccagctgaggagctcacctgccaatccagctgaggctgggcagaggtgggtgagaagagggaaaattgcagggacctccagttgggccaggccagaagctgctgtagctttaaccagacagctcagacctgtctggaggctgccagtgacaggttaggtttagggcagagaagaagcaagaccatggtggggaagatgtggcctgtgttgtggacactctgtgcagtcagggtgaccgtcgatgccatctctgtggaaactccgcaggacgttcttcgggcttcgcagggaaagagtgtcaccctgccctgcacctaccacacttccacctccagtcgagagggacttattcaatgggataagctcctcctcactcatacggaaagggtggtcatctggccgttttcaaacaaaaactacatccatggtgagctttataagaatcgcgtcagcatatccaacaatgctgagcagtccgatgcctccatcaccattgatcagctgaccatggctgacaacggcacctacgagtgttctgtctcgctgatgtcagacctggagggcaacaccaagtcacgtgtccgcctgttggtcctcgtgccaccctccaaaccagaatgcggcatcgagggagagaccataattgggaacaacatccagctgacctgccaatcaaaggagggctcaccaacccctcagtacagctggaagaggtacaacatcctgaatcaggagcagcccctggcccagccagcctcaggtcagcctgtctccctgaagaatatctccacagacacatcgggttactacatctgtacctccagcaatgaggaggggacgcagttctgcaacatcacggtggccgtcagatctccctccatgaacgtggccctgtatgtgggcatcgcggtgggcgtggttgcagccctcattatcattggcatcatcatctactgctgctgctgccgagggaaggacgacaacactgaagacaaggaggatgcaaggccgaaccgggaagcctatgaggagccaccagagcagctaagagaactttccagagagagggaggaggaggatgactacaggcaagaagagcagaggagcactgggcgtgaatccccggaccacctcgaccagtgacaggccagcagcagagggcggcggaggaagggttaggggttcattctcccgcttcctggcctcccttctcctttctaagccctgttctcctgtccctccatcccagacattgatggggacatttcttccccagtgtcagctgtggggaacatggctggcctggtaagggggtccctgtgctgatcctgctgacctcactgtcctgtgaagtaacccctcctggctgtgacacctggtgcgggcctggccctcactcaagaccaggctgcagcctccacttccctcgtagttggcaggagctcctggaagcacagcgctgagcatggggcgctcccactcagaactctccagggaggcgatgccagccttggggggtgggggctgtcctgctcacctgtgtgcccagcacctggaggggcaccaggtggagggtttgcactccacacatctttcttgaatgaatgaaagaataagtgagtatgcttgggccctgcattggcctggcctccagctcccactccctttccaacctcacttcccgtagctgccagtatgttccaaaccctcctgggaaggccacctcccactcctgctgcacaggccctggggagcttttgcccacacactttccatctctgcctgtcaatatcgtacctgtccctccaggcccatctcaaatcacaaggatttctctaaccctatcctaattgtccacatacgtggaaacaatcctgttactctgtcccacgtccaatcatgggccacaaggcacagtcttctgagcgagtgctctcactgtattagagcgccagctccttggggcagggcctgggcctcatggcttttgctttccctgaagccctagtagctggcgcccatcctagtgggcacttaagcttaattggggaaactgctttgattggttgtgccttcccttctctggtctccttgagatgatcgtagacacagggatgattcccacccaaacccacgtattcattcagtgagttaaacacgaattgatttaaagtgaacacacacaagggagcttgcttgcagatggtctgagttcttgtgtcctggtaattcctctccaggccagaataattggcatgtctcctcaacccacatggggttcctggttgttcctgcatcccgatacctcagccctggccctgcccagcccatttgggctctggttttctggtggggctgtcctgctgccctcccacagcctccttctgtttgtcgagcatttcttctactcttgagagctcaggcagcgttagggctgcttaggtctcatggaccagtggctggtctcacccaactgcagtttactattgctatcttttctggatgatcagaaaaataattccataaatctattgtctacttgcgattttttaaaaaatgtatatttttatatatattgttaaatcctttgcttcattccaaatgctttcagtaataataaaattgtgggtgg

SEQ ID NO: 49 - DNA, 979 bp, Homo sapiens
  human hypothetical LOC100129455 protein (LOC100129455) cDNA
cttaaagggggcccataaagacgcactgccaagggctccgtgtgccccggggccgcgggaatgcggatcgcagccggcagggaggggccgcggcggagccttagacttgggggagccaaggaggccactcccaggaggctgcggagcaaatgactgcctccccgagcccctggctgcaaaagcagaggttgcccgtggcttttgcagctctggacacgcgggtgcagcccagggaacgtggacaagaggtgttgacggaccggaccgtgcatttgagttggggcatatcgaagtggtttaattaaaagccgcgagtgtggccccagatcctggcgttatcaaagcaaatcaaagcctttcttttccagccgagcgggccctgtggaaatgagatgtacatttacccttgacgcaccgcaagcctggccgaggctctcaggttaattgatatttaatggaaatcatgcccatgaatatagtttccatcatttcacccttgatagacgtcagccctgggcgcagggggaggctgaagaatgcaggagggggcattaggcttgctgagagagtaaatagaagagcggacagaaacgttctgaggcgggaaaaagggctcgcgctggggagggtgacatttcctcgggcaggacgcggctcccgggtctcagccccggcgcgcagcgaaccagggccggctgcggttcccggaggagtgcggagggcagacgaccgcaagttccccccaggagcctcccagccggcgttcagatcgcgccggttccaggcagctgcaggcggcccatcttatgctaacgatcctacttcctccgccaagcctgtgaaattactgccgagagagcgcgcaggcctcaaagttacgaatttttcccaaagcagagaaagagaaggctcagcctagtttgtgagcagagatgaagaaaagttgcccgagtcatgtggcccagtcgagtgtgaatcg

SEQ ID NO: 50 - DNA, 979 bp, Homo sapiens; identical to SEQ ID NO: 49
  human hypothetical LOC100129455 protein (LOC100129455) cDNA

SEQ ID NO: 51 - DNA, 979 bp, Homo sapiens; identical to SEQ ID NO: 49
  human hypothetical LOC100129455 protein (LOC100129455) cDNA

SEQ ID NO: 52 - DNA, 3503 bp, Homo sapiens
  human RUN and SH3 domain containing 1 (RUSC1), transcript variant 1 cDNA
acgcccatgcgcgaaggggtgcagctgcgcagcgcagggtaggttgtgctagtgcccctcccctcccgctctgtgccccgccgggcggggaccgtgggagccgcggacaagcccaaggccggagcggttccaggaggaccctggtctgcacctgtggttgccaggtaggtggatgtgagagaccctacccttctggttctctagaagccatcccatcgccgctagcatcatgctgtcccctcagagagctttactctgcaacctcaaccacatccacctccagcacgtctccctgggcctgcacttgtcccgccgtcctgagctacaggaggggcctttgagcacaccccctcctccaggagacactgggggcaaggagagcaggggcccctgcagtggcaccctggtggacgccaattccaacagcccagctgtgccctgccggtgctgccaggagcacggtccgggcctagaaaaccggcaggacccgtcacaggaggaagagggggctgcctctccctcagacccaggctgctcctcctcactcagctcctgctcagatcttagccccgatgagtcccctgtctcagtctacttgcgggacctccctggtgatgaggatgcccaccctcagcccagtatcatccccctggagcagggctccccactggcttcagcaggccctggcacctgctcaccggacagcttctgctgctctcctgattcctgctccggagcttcttcttcacccgatcctggcctggactcgaactgcaacgccctgaccacctgccaggacgtcccttccccaggcttggaggaagaggacgagagggcggagcaggatctccctacctctgagctcttagaggcggatgatgggaaaatcgacgctgggaaaacggagcccagttggaagattaacccaatttggaaaattgacacagagaaaactaaagctgaatggaaaaccactgaaaacaataacactggttggaaaaacaacgggaatgttaactctagctggaaaagtgaacctgaaaaattcgactctggttggaaaaccaacacaagaataactgattctggctcgaaaacagatgcagggaaaattgatggaggatggagaagtgacgtcagcgaggagccggtgccccaccggacaatcacgtccttccacgagctggcccagaagcgcaagcggggcccagggctgccccttgtcccgcaggcgaagaaagatcgcagtgactggctcatagtcttctcgcccgacaccgagctccccccctcggggtcgccgggcggctcctcggcacctcctcgggaagtcaccaccttcaaggaactccggtcccgaagccgggccccagccccgccagtcccgcctcgagaccccccagttggctgggctttggtcccgccccggcccccacccccgcctgtccctccccgaaggaagaagaaccgacctggactgcagcccatagcggaggggcagtccgaggagggccgggctgtcagcccagcggctggcgaggaggccccagccgcgaaggagccgggcgcgcaggccggcctggaggtccgtagttcgtggtccttcgccggtgtccccggagcccagcggctgtggatggcagaagcccagagtgggactggtcagctgcaggagcagaagaaaggtcttctgatagccgtcagcgtctccgttgataaaatcatctcgcatttcggggccgcccggaacttggtgcagaaggcccagttgggtgatagccggctgagcccggatgtggggcacctggtgctgaccaccctctgcccggccctccacgccctggtggcggacgggctgaagcctttccggaaggacctcatcaccgggcagcgcaggagcagcccctggagcgtggtggaggcgtcggtgaagccaggctccagcacccgctcccttggaaccctgtatagccaggtcagccgtctagccccgctgagcagcagccgtagccgcttccatgcctttatcctgggcctcctcaacaccaagcagttggagctgtggttttccagtctccaggaagatgcaggcctgctctccctcctgtacctgccaacaggatttttctccctggcccgcggtggttgtccctccctgtccacagagctgctgctcctgctgcagccattgtcggtgctcactttccacctggacctgctctttgagcaccaccaccacctgcccctgggcccacctcaggcccctgcccctccaggcccacctccagctctgcagcagactatgcaagccatgctgcactttgggggccggctggcccagagccttcgggggacttccaaggaagctgcttcagacccctctgactctccaaaccttcccacaccagggagctggtgggagcagttgacccaggcctcccgggtctatgcctctgggggcactgagggctttcctctttcccgatgggcaccggggcgtcatgggactgcagctgaagaaggtgcacaggagagacccctgcccacagatgagatggcaccaggcaggggcctctggttgggaagactatttggagtgcctgggggccccgcagaaaatgagaatggagccctaaagtccaggagaccatctagctggctgcccccgacagtgagtgtgttggctcttgtgaagcggggggcacctcccgagatgccttctcctcaggagcttgaggcctcagcacccaggatggtgcaaacccatagggcagtgcgggctctctgtgatcacactgctgcaagacctgaccagttgagcttccggcgtggggaagtgctgcgtgtcatcaccacagtggatgaggactggctccgctgtgggcgggatggcatggagggtctggtgcctgtggggtatacctcccttgttctgtagccctgggaccctttcctgcgtatgtgtctccttcctgtcacctgggaatggaatggccagtgaacaccatcccagaagcattttccctctgcaaaatgacgtttcttcccacgtctgtttctgctaatatttaaaataaactttccttcttccctcctatacccacctgtaaggtgaaatctgctcttcttccaaatatataaaaaaggaattgccctccaggtaatccctttcctttttcccgtctatataagggaatgtcttccttcctatctatctgcaaaatggaaatctagacctccttcttcatccataagtggactgtgccagtacaatacatgcctcagcccccaagcctagaaggacctctagtctccttcctgtgtggaatcttccccactccatccctcccaagttgcctgtattgataatgtactcactcatgctgtactaggtgctgaagcctggacacccttggtgggtgggcctgtggtgatggtttgcatccttcctcctttgtcccaataaagtatgggagttgaatgtgaaaaaaaaaaaaaaaaaa

SEQ ID NO: 53 - DNA, 3185 bp, Homo sapiens
  human RUN and SH3 domain containing 1 (RUSC1), transcript variant 2 cDNA
acgcccatgcgcgaaggggtgcagctgcgcagcgcagggtaggttgtgctagtgcccctcccctcccgctctgtgccccgccgggcggggaccgtgggagccgcggacaagcccaaggccggagcggttccaggaggaccctggtctgcacctgtggttgccaggtaggtggatgtgagagaccctacccttctggttctctagaagccatcccatcgccgctagcatcatgctgtcccctcagagagctttactctgcaacctcaaccacatccacctccagcacgtctccctgggcctgcacttgtcccgccgtcctgagctacaggaggggcctttgagcacaccccctcctccaggagacactgggggcaaggagagcaggggcccctgcagtggcaccctggtggacgccaattccaacagcccagctgtgccctgccggtgctgccaggagcacggtccgggcctagaaaaccggcaggacccgtcacaggaggaagagggggctgcctctccctcagacccaggctgctcctcctcactcagctcctgctcagatcttagccccgatgagtcccctgtctcagtctacttgcgggacctccctggtgatgaggatgcccaccctcagcccagtatcatccccctggagcagggctccccactggcttcagcaggccctggcacctgctcaccggacagcttctgctgctctcctgattcctgctccggagcttcttcttcacccgatcctggcctggactcgaactgcaacgccctgaccacctgccaggacgtcccttccccaggcttggaggaagaggacgagagggcggagcaggatctccctacctctgagctcttagaggcggatgatgggaaaatcgacgctgggaaaacggagcccagttggaagattaacccaatttggaaaattgacacagagaaaactaaagctgaatggaaaaccactgaaaacaataacactggttggaaaaacaacgggaatgttaactctagctggaaaagtgaacctgaaaaattcgactctggttggaaaaccaacacaagaataactgattctggctcgaaaacagatgcagggaaaattgatggaggatggagaagtgacgtcagcgaggagccggtgccccaccggacaatcacgtccttccacgagctggcccagaagcgcaagcggggcccagggctgccccttgtcccgcaggcgaagaaagatcgcagtgactggctcatagtcttctcgcccgacaccgagctccccccctcggggtcgccgggcggctcctcggcacctcctcgggaagtcaccaccttcaaggaactccggtcccgaagccgggccccagccccgccagtcccgcctcgagaccccccagttggctgggctttggtcccgccccggcccccacccccgcctgtccctccccgaaggaagaagaaccgacctggactgcagcccatagcggaggggcagtccgaggagggccgggctgtcagcccagcggctggcgaggaggccccagccgcgaaggagccgggcgcgcaggccggcctggaggtccgtagttcgtggtccttcgccggtgtccccggagcccagcggctgtggatggcagaagcccagagtgggactggtcagctgcaggagcagaagaaaggtcttctgatagccgtcagcgtctccgttgataaaatcatctcgcatttcggggccgcccggaacttggtgcagaaggcccagttgggtgatagccggctgagcccggatgtggggcacctggtgctgaccaccctctgcccggccctccacgccctggtggcggacgggctgaagcctttccggaaggacctcatcaccgggcagcgcaggagcagcccctggagcgtggtggaggcgtcggtgaagccaggctccagcacccgctcccttggaaccctgtatagccaggtcagccgtctagccccgctgagcagcagccgtagccgcttccatgcctttatcctgggcctcctcaacaccaagcagttggagctgtggttttccagtctccaggaagatgcagggagctggtgggagcagttgacccaggcctcccgggtctatgcctctgggggcactgagggctttcctctttcccgatgggcaccggggcgtcatgggactgcagctgaagaaggtgcacaggagagacccctgcccacagatgagatggcaccaggcaggggcctctggttgggaagactatttggagtgcctgggggccccgcagaaaatgagaatggagccctaaagtccaggagaccatctagctggctgcccccgacagtgagtgtgttggctcttgtgaagcggggggcacctcccgagatgccttctcctcaggagcttgaggcctcagcacccaggatggtgcaaacccatagggcagtgcgggctctctgtgatcacactgctgcaagacctgaccagttgagcttccggcgtggggaagtgctgcgtgtcatcaccacagtggatgaggactggctccgctgtgggcgggatggcatggagggtctggtgcctgtggggtatacctcccttgttctgtagccctgggaccctttcctgcgtatgtgtctccttcctgtcacctgggaatggaatggccagtgaacaccatcccagaagcattttccctctgcaaaatgacgtttcttcccacgtctgtttctgctaatatttaaaataaactttccttcttccctcctatacccacctgtaaggtgaaatctgctcttcttccaaatatataaaaaaggaattgccctccaggtaatccctttcctttttcccgtctatataagggaatgtcttccttcctatctatctgcaaaatggaaatctagacctccttcttcatccataagtggactgtgccagtacaatacatgcctcagcccccaagcctagaaggacctctagtctccttcctgtgtggaatcttccccactccatccctcccaagttgcctgtattgataatgtactcactcatgctgtactaggtgctgaagcctggacacccttggtgggtgggcctgtggtgatggtttgcatccttcctcctttgtcccaataaagtatgggagttgaatgtgaaaaaaaaaaaaaaaaaa

SEQ ID NO: 54 - DNA, 2525 bp, Homo sapiens
  human RUN and SH3 domain containing 1 (RUSC1), transcript variant 3 cDNA
gccgactccaagcaagtttgtcggccttggggagtctggccccgttcctagtgctggagggggaagttgttgcctttcctgctccgtgggccggccccctctccctccagacccacctgggcatagtggacgcgggcttacccagcctccatgccaagtctagggggtcccagcgagtctgttgttaggggctttgggtcacaccctctgtggaattccttggcctgtgcagctcgggcctgccccccgaccttgctagggaggggtggagggtgaagctcccgggagctcattggcactagaggttctggccacgccctctccgcgagtccagtcccacgcgggatgaagagggcaccctccgccaagaggctgctgcgggacccgggtttcccctttccggcgccttccagcctcccaatcctcgggtctcgcctccctccgtctcctccctttcccctgtctgtctttccattggtccatgccgcccacgtgctccccggggctccgcaggcaggactgggccccggggcggtgcgctgggctgcacctccctccccgcgccccgtcctctcccgccctacaggccctagcagggcaggcgggagtccgtagttcgtggtccttcgccggtgtccccggagcccagcggctgtggatggcagaagcccagagtgggactggtcagctgcaggagcagaagaaaggtcttctgatagccgtcagcgtctccgttgataaaatcatctcgcatttcggggccgcccggaacttggtgcagaaggcccagttgggtgatagccggctgagcccggatgtggggcacctggtgctgaccaccctctgcccggccctccacgccctggtggcggacgggctgaagcctttccggaaggacctcatcaccgggcagcgcaggagcagcccctggagcgtggtggaggcgtcggtgaagccaggctccagcacccgctcccttggaaccctgtatagccaggtcagccgtctagccccgctgagcagcagccgtagccgcttccatgcctttatcctgggcctcctcaacaccaagcagttggagctgtggttttccagtctccaggaagatgcaggcctgctctccctcctgtacctgccaacaggatttttctccctggcccgcggtggttgtccctccctgtccacagagctgctgctcctgctgcagccattgtcggtgctcactttccacctggacctgctctttgagcaccaccaccacctgcccctgggcccacctcaggcccctgcccctccaggcccacctccagctctgcagcagactatgcaagccatgctgcactttgggggccggctggcccagagccttcgggggacttccaaggaagctgcttcagacccctctgactctccaaaccttcccacaccagggagctggtgggagcagttgacccaggcctcccgggtctatgcctctgggggcactgagggctttcctctttcccgatgggcaccggggcgtcatgggactgcagctgaagaaggtgcacaggagagacccctgcccacagatgagatggcaccaggcaggggcctctggttgggaagactatttggagtgcctgggggccccgcagaaaatgagaatggagccctaaagtccaggagaccatctagctggctgcccccgacagtgagtgtgttggctcttgtgaagcggggggcacctcccgagatgccttctcctcaggagcttgaggcctcagcacccaggatggtgcaaacccatagggcagtgcgggctctctgtgatcacactgctgcaagacctgaccagttgagcttccggcgtggggaagtgctgcgtgtcatcaccacagtggatgaggactggctccgctgtgggcgggatggcatggagggtctggtgcctgtggggtatacctcccttgttctgtagccctgggaccctttcctgcgtatgtgtctccttcctgtcacctgggaatggaatggccagtgaacaccatcccagaagcattttccctctgcaaaatgacgtttcttcccacgtctgtttctgctaatatttaaaataaactttccttcttccctcctatacccacctgtaaggtgaaatctgctcttcttccaaatatataaaaaaggaattgccctccaggtaatccctttcctttttcccgtctatataagggaatgtcttccttcctatctatctgcaaaatggaaatctagacctccttcttcatccataagtggactgtgccagtacaatacatgcctcagcccccaagcctagaaggacctctagtctccttcctgtgtggaatcttccccactccatccctcccaagttgcctgtattgataatgtactcactcatgctgtactaggtgctgaagcctggacacccttggtgggtgggcctgtggtgatggtttgcatccttcctcctttgtcccaataaagtatgggagttgaatgtgaaaaaaaaaaaaaaaaaa

SEQ ID NO: 55 - DNA, 2078 bp, Homo sapiens
  human RUN and SH3 domain containing 1 (RUSC1), transcript variant 4 cDNA
acgtgctccccggggctccgcaggcaggactgggccccggggcggtgcgctgggctgcacctccctccccgcgccccgtcctctcccgccctacaggccctagcagggcaggcgggaggtgagcgcggccatcccgctcccggagttccgggatcctggagtccgtagttcgtggtccttcgccggtgtccccggagcccagcggctgtggatggcagaagcccagagtgggactggtcagctgcaggagcagaagaaaggtcttctgatagccgtcagcgtctccgttgataaaatcatctcgcatttcggggccgcccggaacttggtgcagaaggcccagttgggtgatagccggctgagcccggatgtggggcacctggtgctgaccaccctctgcccggccctccacgccctggtggcggacgggctgaagcctttccggaaggacctcatcaccgggcagcgcaggagcagcccctggagcgtggtggaggcgtcggtgaagccaggctccagcacccgctcccttggaaccctgtatagccaggtcagccgtctagccccgctgagcagcagccgtagccgcttccatgcctttatcctgggcctcctcaacaccaagcagttggagctgtggttttccagtctccaggaagatgcaggcctgctctccctcctgtacctgccaacaggatttttctccctggcccgcggtggttgtccctccctgtccacagagctgctgctcctgctgcagccattgtcggtgctcactttccacctggacctgctctttgagcaccaccaccacctgcccctgggcccacctcaggcccctgcccctccaggcccacctccagctctgcagcagactatgcaagccatgctgcactttgggggccggctggcccagagccttcgggggacttccaaggaagctgcttcagacccctctgactctccaaaccttcccacaccagggagctggtgggagcagttgacccaggcctcccgggtctatgcctctgggggcactgagggctttcctctttcccgatgggcaccggggcgtcatgggactgcagctgaagaaggtgcacaggagagacccctgcccacagatgagatggcaccaggcaggggcctctggttgggaagactatttggagtgcctgggggccccgcagaaaatgagaatggagccctaaagtccaggagaccatctagctggctgcccccgacagtgagtgtgttggctcttgtgaagcggggggcacctcccgagatgccttctcctcaggagcttgaggcctcagcacccaggatggtgcaaacccatagggcagtgcgggctctctgtgatcacactgctgcaagacctgaccagttgagcttccggcgtggggaagtgctgcgtgtcatcaccacagtggatgaggactggctccgctgtgggcgggatggcatggagggtctggtgcctgtggggtatacctcccttgttctgtagccctgggaccctttcctgcgtatgtgtctccttcctgtcacctgggaatggaatggccagtgaacaccatcccagaagcattttccctctgcaaaatgacgtttcttcccacgtctgtttctgctaatatttaaaataaactttccttcttccctcctatacccacctgtaaggtgaaatctgctcttcttccaaatatataaaaaaggaattgccctccaggtaatccctttcctttttcccgtctatataagggaatgtcttccttcctatctatctgcaaaatggaaatctagacctccttcttcatccataagtggactgtgccagtacaatacatgcctcagcccccaagcctagaaggacctctagtctccttcctgtgtggaatcttccccactccatccctcccaagttgcctgtattgataatgtactcactcatgctgtactaggtgctgaagcctggacacccttggtgggtgggcctgtggtgatggtttgcatccttcctcctttgtcccaataaagtatgggagttgaatgtgaaaaaaaaaaaaaaaaaa

SEQ ID NO: 56 - DNA, 1566 bp, Homo sapiens
  human cell division cycle 123 homolog (S. cerevisiae) (CDC123) cDNA
agcgtgcgtttagggcgaagacggagttgtaaacttcttaaaattcctctctcgacacttcggtaattcctctttcgagactaaagctctttttgtatgcgtgtgtgtcaagcgtatgccccgggattctcctccgcttccttttctcggtcttccttcttgctttagggaccggaagagtccttgaaccaaaatagctcggcgggcacttccggggccggcgcccagagttccgggagggtgcaggcaggagagggaaaggcagcagcggcggcagctggaggatgaagaaggagcatgtgcttcactgccagttctccgcgtggtacccgttcttccgaggcgttaccatcaagagtgtcattcttccacttcctcagaatgtgaaggattatttactcgatgatggaactctggtggtttcaggaagggatgatccaccaacacattctcagccagacagtgatgatgaagcagaagaaatacagtggtctgatgatgagaacacagccacgcttacggcaccagaatttcctgagtttgccactaaagtccaggaagctatcaattccctcgggggcagtgtctttcctaagcttaattggagtgccccaagggatgcgtattggatagcaatgaatagttctctgaaatgtaaaaccctcagcgacatctttctgcttttcaagagttccgatttcatcactcgtgacttcactcagccgtttattcattgtactgatgattctccagatccatgtatagaatatgagctcgttctccgaaaatggtgtgaattgattcctggggctgagtttcgatgttttgtcaaggaaaacaagcttattggtatttctcaaagagactacacacaatactatgatcatatttctaaacaaaaggaagaaattcgcagatgcatacaagactttttcaagaaacacatacagtacaaattcttagatgaagactttgtgttcgatatatacagagacagtagggggaaggtgtggctcattgactttaatccatttggtgaagtcacagattcactgctgttcacctgggaagaactgatatctgagaacaacttaaacggcgattttagtgaagttgacgctcaagagcaggattccccagctttccgttgcacaaacagtgaagtgacagtccagcccagcccctatttgagttaccggctacccaaggactttgtagacctctctactggggaggacgctcacaagctaatagacttccttaagctgaagagaaatcagcaggaggacgactgatgagcgtactggaactggagaagaggaggccccgccccaccgctccgggagctgctcatcagccgcaacttcctgccgaccctgatgcgggtgggccgagcagtgtggacatcagccactttttatattcatgtacattcacctggggaaaaaaacggagggactttgctacttgtaaaaataacataataaatagatcttaaacataggaaaaccatactgttctgataataaaatgctttctatgaaatacaaaaaaaaaaaaaaaaaa

SEQ ID NO: 57 - DNA, 835 bp, Homo sapiens
  human chromosome 10 open reading frame 99 (C10orf99), hypothetical protein LOC387695 precursor cDNA
aggacttctgcagcacagctcccttcccaggacgtgaaaatctgccttctcaccatgaggcttctagtcctttccagcctgctctgtatcctgcttctctgcttctccatcttctccacagaagggaagaggcgtcctgccaaggcctggtcaggcaggagaaccaggctctgctgccaccgagtccctagccccaactcaacaaacctgaaaggacatcatgtgaggctctgtaaaccatgcaagcttgagccagagccccgcctttgggtggtgcctggggcactcccacaggtgtagcactcccaaagcaagactccagacagcggagaacctcatgcctggcacctgaggtacccagcagcctcctgtctcccctttcagccttcacagcagtgagctgcaatgttggagggcttcatctcgggctgcaaggaccctgggaaagttccagaactccacgtccttgtctcaattgtgccatcaactttcagagctatcatgagccaacctcaccccacagggcctcagtcgccaccatgtgggcctctccagtgcaaaccaccgagcattccaccatgaccggtcacagctacaaatccagagaccatcaatcctgctagagtgcagggtggcaagcacccaagggtggctgaccaagactgcagagtctcctccatcttcaggtccattcagcctcctggcatttaactaccagcatccagtggtccccaaggaatcccttcctagcctcctgacatgagtctgctggaaagagcatccaaacaaacaagtaataaataaataaataaactcaatgcagacacaaaaaaaa

SEQ ID NO: 58 - DNA, 2808 bp, Homo sapiens
  human vasoactive intestinal peptide receptor 1 (VIPR1) precursor cDNA
ctcttagctctggggccacagcgccagcgccactctgccaggctcccggccatcgcccgcctggtgcgccgcccgccagctctttgcccgcgcggggccgcccgccgcgggctcagggcagaccatgcgcccgccaagtccgctgcccgcccgctggctatgcgtgctggcaggcgccctcgcctgggcccttgggccggcgggcggccaggcggccaggctgcaggaggagtgtgactatgtgcagatgatcgaggtgcagcacaagcagtgcctggaggaggcccagctggagaatgagacaataggctgcagcaagatgtgggacaacctcacctgctggccagccacccctcggggccaggtagttgtcttggcctgtcccctcatcttcaagctcttctcctccattcaaggccgcaatgtaagccgcagctgcaccgacgaaggctggacgcacctggagcctggcccgtaccccattgcctgtggtttggatgacaaggcagcgagtttggatgagcagcagaccatgttctacggttctgtgaagaccggctacaccattggctacggcctgtccctcgccacccttctggtcgccacagctatcctgagcctgttcaggaagctccactgcacgcggaactacatccacatgcacctcttcatatccttcatcctgagggctgccgctgtcttcatcaaagacttggccctcttcgacagcggggagtcggaccagtgctccgagggctcggtgggctgtaaggcagccatggtctttttccaatattgtgtcatggctaacttcttctggctgctggtggagggcctctacctgtacaccctgcttgccgtctccttcttctctgagcggaagtacttctgggggtacatactcatcggctggggggtacccagcacattcaccatggtgtggaccatcgccaggatccattttgaggattatgggtgctgggacaccatcaactcctcactgtggtggatcataaagggccccatcctcacctccatcttggtaaacttcatcctgtttatttgcatcatccgaatcctgcttcagaaactgcggcccccagatatcaggaagagtgacagcagtccatactcaaggctagccaggtccacactcctgctgatccccctgtttggagtacactacatcatgttcgccttctttccggacaattttaagcctgaagtgaagatggtctttgagctcgtcgtggggtctttccagggttttgtggtggctatcctctactgcttcctcaatggtgaggtgcaggcggagctgaggcggaagtggcggcgctggcacctgcagggcgtcctgggctggaaccccaaataccggcacccgtcgggaggcagcaacggcgccacgtgcagcacgcaggtttccatgctgacccgcgtcagcccaggtgcccgccgctcctccagcttccaagccgaagtctccctggtctgaccaccaggatcccaggggcccaaggcggcccctcccgccccttcccactcaccccggcagacgccggggacagaggcctgcccgggcgcggccagccccggccctgggctcggaggctgcccccggccccctggtctctggtccggacactcctagagaacgcagccctagagcctgcctggagcgtttctagcaagtgagagagatgggagctcctctcctggaggattgcaggtggaactcagtcattagactcctcctccaaaggccccctacgccaatcaagggcaaaaagtctacatactttcatcctgactctgccccctgctggctcttctgcccaattggaggaaagcaaccggtggatcctcaaacaacactggtgtgacctgagggcagaaaggttctgcccgggaaggtcaccagcaccaacaccacggtagtgcctgaaatttcaccattgctgtcaagttcctttgggttaagcattaccactcaggcatttgactgaagatgcagctcactaccctattctctctttacgcttagttatcagctttttaaagtgggttattctggagtttttgtttggagagcacacctatcttagtggttccccaccgaagtggactggcccctgggtcagtctggtgggaggacggtgcaacccaaggactgagggactctgaagcctctgggaaatgagaaggcagccaccagcgaatgctaggtctcggactaagcctacctgctctccaagtctcagtggcttcatctgtcaagtgggatctgtcacaccagccatacttatctctctgtgctgtggaagcaacaggaatcaagagctgccctccttgtccacccacctatgtgccaactgttgtaactaggctcagagatgtgcacccatgggctctgacagaaagcagatacctcaccctgctacacatacaggatttgaactcagatctgtctgataggaatgtgaaagcacggactcttactgctaacttttgtgtatcgtaaccagccagatcctcttggttatttgtttaccacttgtattattaatgccattatccctgaatcccccttgccaccccaccctccctggagtgtggctgaggaggcctccatctcatgtatcatctggataggagcctgctggtcacagcctcctctgtctgcccttcaccccagtggccactcagcttcctacccacacctctgccagaagatcccctcaggactgcaacaggcttgtgcaacaataaatgttggcttggattggcaaaaaaaaaaaaaaaaaa

SEQ ID NO: 59 - DNA, 4328 bp, Homo sapiens
  human family with sequence similarity 21, member B (FAM21B), hypothetical protein LOC55747 cDNA
atgcccaggctttctggcaagtcagtgcgtgtatatgatgaagaagtggaggagccagtactcaaggctgaggcagaaaaaacagagcaggagaagacacgagagcagaaagaagtagatctcattcctaaagtccaggaggctgtgaactatggcttacaagtattggacagtgcctttgagcaacttgatatcaaagcaggaaactcagactccgaggaagatgatgctaatgggcgggtggaactgatccttgaaccaaaggatctatacattgatcgtcctttaccatatctcattgggtcaaagctgttcatggaacaagaagatgtaggtcttggagagctgtccagtgaagaaggctctgtaggcagtgatcgtggcagtattgtggacactgaggaagagaaagaagaggaggagtcagatgaagattttgcccatcatagtgacaatgaacaaaaccggcacaccacacaaatgagtgatgaggaagaggatgatgatggctgtgaccttttcgctgactctgagaaggaggaggaagatattgaggacattgaagaaaatactagacctaaaagaagcagacctacatcgtttgcagatgagctggctgcccgcatcaagggggatgccgtgggtcgagtggacgaggagccgacaaccttaccctcaggagaagcaaaacctcggaagacactcaaagagaagaaggaaaggagaactccttcagacgatgaagaggataacttattcacaccccccaagctgaccgacgaggacttctcgccatttggctctggaggtggcctgttcagtgggggcaaggggctatttgatgatgaggacgaggagagtgacctcttcacggaagccccccaggatcggcaagctggagcctctgttaaggaggagtcttcatcatccaaacctggaaagaaaatcccagcaggagctgtttctgtatttttaggagacacggatgtgtttggtgctgcctccgttccatcaatgaaggagccacagaagcctgagcagcccactccaaggaaaagcccctatggtccccctcccactggcctctttgatgatgatgatggtgatgatgatgacgactttttctcggcaccccacagcaaaccttctaaaacaggcaaagtccaatccactgccgatatctttggtgacgaagaaggagatctgttcaaagaaaaagccgtagcatcgccagaagccactgtgagtcagacagatgaaaataaagcaagagcagaaaaaaaggttaccttatcttccagcaaaaatctcaagccctcatcagaaacaaagactcaaaaaggcttattttcagatgaggaggactctgaggatttgttttcttctcaaagtgcgagtaagttaaaaggtgcatctctgctgcctggcaagctccccacgtcggtttccctgtttgatgatgaagatgaagaggataatctttttgggggtacagctgctaagaagcagacattgtgtctacaagctcagagagaagagaaagcaaaagcctccgagctctccaaaaagaaagcatctgccctgttgttcagcagtgatgaggaggaccagtggaatattcctgcttcacagacccacttagcatctgacagcaggtctaaaggagaacccagggattctgggaccctccagagccaggaggccaaggctgtgaaaaagaccagtctctttgaggaagacgaagaagatgatctttttgccattgccaaggacagccaaaagaagacccagagagtgtcactcctctttgaagacgatgttgatagccgaggctctctgtttggctctcctcccacatctgttcctcctgcaacaaagaaaaaagagactgtctctgaggcaccacctttgctgttcagcgatgaagaagagaaggaggcacaacttggagtgaagtctgtggataagaaggttgagagtgccaaggagtcattaaaatttgggagaactgatgtggctgagtcagaaaaggaaggacttttgactagatctgctcaggaaacagtcaagcattctgatttattttcttcatcatccccatgggacaaaggaaccaagcctagaaccaaaactgttcttagcttgtttgatgaggaagaggataaaatggaagatcaaaacattatccaggctccacagaaagaagtaggaaagggccgcgatcctgatgcccaccccaagagcacaggtgtcttccaggatgaagagctgcttttcagccacaagctccaaaaggacaatgacccagatgttgacctttttgctggcaccaaaaaaaccaagctgttagagccaagtgttgggagcctgtttggggatgatgaagatgatgatcttttcagctctgccaagtcccagcctttggtacaagagaaaaagagagtagtgaaaaaagaccactctgttgactctttcaaaaaccagaaacatcctgaatccattcaaggtagtaaagaaaaaggcatatggaagccagaaacacctcaggactcatcaggtctcgctccatttaaaaccaaagaaccatccactcggatcgggaagatacaagcaaatttagcgatcaacccagcggccttgctgcccacagcggcttcccagatctctgaagtaaagcctgttttgccagaattggcttttccttcatctgaacacagaaggagccacggtctggaaagtgtgcctgtccttcccgggagtggggaggccggtgtgagttttgatcttccagctcaggcagacaccttacacagtgcaaacaagagccgtgtcaagatgagagggaagcgtagaccgcagacccgtgcagctaggcggctggctgctcaggagtccagcgagactgaggacatgagcgtccccagaggacccattgcacagtgggctgatggcgccatttccccaaatggccatcggccacagctcagagcagccagtggagaagacagcactgaggaggccctggcagctgccgctgcaccttgggaaggtggtcctgtgcctggagtggacagaagcccctttgcaaagtctctgggtcattccagaggggaggctgacctttttgattctggggacatcttttccacgggcactggatctcagtctgtggagagaacaaaacccaaggcaaagatagcagagaatcctgccaacccaccagtgggtggtaaagcaaagagccccatgtttcctgctctaggtgaggccagcagtgatgatgatctctttcagtctgctaaaccaaaaccagcaaagaaaacaaatacctttcctctcctggaagatgaggatgacctctttacagatcagaaagtcaagaagaatgagacaaaatccaatagtcagcaggatgtcatattaacaacacaagatatttttgaggatgatatatttgctacggaagcaattaaaccctctcagaaaaccagagagaaggagaaaacattggaatctaatttatttgatgataacattgatatctttgctgacttaactgtaaaaccaaaagaaaagtccaaaaagaaagtggaagccaagtctatatttgatgatgatatggatgacatcttctcctctggtatccaggctaagacaaccaaaccaaaaagccgatctgcacaggccgcacctgaaccaagatttgaacacaaggtgtccaacatctttgatgatcccctgaatgcctttggaggccagtagagcacacagggtatccacaggttaccctgcagctacattgttgagttagtgatgatgttgtatatgctgatggtcttaactggattacaaaaagcaaatactagaacagctagctcatcgttcacccaatgtacttggtatttttctgcactggtttaatcatgcttaatactacaaaacaaaaataaatatttcacagtggttggtttgttttgtttttaaaccacagtttgatttagttagccttgctggggccataatatgcttcagggtgtgtaaaagaagaaatctctttgtggctttcatgggcagggaatcccagagatagcaaatgccacctgaccagaagtctttgttatatggatgggaaccctaacttagggcctgggcaggggaaagagaaagaaggtgagagattatacttcatgagtcttagcaatatgggagcaggttttcactgaattctgagggtgcctctgcatgtcctccaaggcaaagtttggcaaactgtggcccccccactgtcatattttgttaataaaattttattggaacacaaccacaaa

SEQ ID NO: 60 - DNA, 3060 bp, Homo sapiens
  human metastasis associated 1 family, member 2 (MTA2), metastasis-associated protein 2 cDNA
tccggaaggaggcgaaccctgaggcgggcccggcaagccttccctgcggccggcagagcccaacgactagtgggactccgcgggggcgggggtagctggagcctggctctggcctggcaggagccgagcttgttccggaagaagccgagcggacgggggccagcctcagcgtcccgggagtgaggcgatagctgcggcggcgacagcgcgggccgggatgaaccgcgacggctgaggcagcggaggtgccggctgcgcgggccccagtgagactccctcgaagcggcagcccaccgttcggggctttgcctcgagccgagccctgcccccgcgagcctcccggacccctttgtgcggccggaggcggcggcgggaacggccatggcggccaacatgtaccgggtgggagattacgtctattttgagaactcttccagcaatccttacctggttagacggattgaggagctcaacaagactgcaaatggaaatgtggaggcaaaggttgtctgtcttttccggcgcagggacatttctagtagcctcaacagcctggctgatagtaatgccagggagtttgaagaggaatcaaagcagccaggggtgtctgagcagcagcgccatcaactgaagcaccgggaactttttctttctcggcaatttgaatcattaccagccacccacatacgggggaaatgcagtgtgaccctcttgaatgagacagatatcttgagccagtacctggaaaaggaggactgctttttttactcactggtgtttgaccccgtgcagaagacacttctcgctgatcagggcgagattagagttggttgcaaataccaagctgagatcccagatcgcctagtagagggagaatctgataatcggaaccagcagaagatggagatgaaggtctgggacccagacaaccctctcacagaccggcagatcgaccagtttcttgtggtggcccgagctgtgggaacctttgcaagagccctagattgtagcagctccattcggcagccaagcttgcacatgagtgcagctgctgcctcccgagatatcactctgtttcacgccatggataccttgcaaaggaacggctacgacctggctaaggccatgtcgaccctggtaccccagggaggcccggtgctgtgtcgggatgagatggaggaatggtcagcctcagaggccatgctatttgaggaggccctagagaagtatgggaaggacttcaatgatattcgccaggattttctaccctggaagtcacttgccagcatagtccagttttattacatgtggaaaaccacagaccggtatattcagcagaaaaggttgaaagctgctgaagcagacagcaaactgaaacaggtctacattcccacctacactaagccaaaccctaaccagatcatttctgtgggttcaaaacctggcatgaatggggctggatttcagaagggcctgacttgtgagagttgccacaccacacagtctgctcagtggtatgcctggggcccacctaacatgcagtgccgcctctgtgcttcctgttggatctactggaagaagtatgggggactgaagaccccaactcagcttgagggggccactcggggcaccacggagccacactcaaggggtcatttatccagacctgaagctcaaagtctctctccttacacaaccagcgccaacagggccaagctactggctaagaacagacaaactttcctgcttcagaccacaaagctgacccgtcttgccagacgcatgtgcagggacctattacagccaaggagggccgcccgacggccttatgctcctatcaatgccaatgccatcaaagcagagtgctccattcgacttcctaaggccgccaagactccattgaagattcaccctctggtgcggctgcccctggcaactatcgtcaaagatctggtggcccaggcacccctgaaaccaaaaacacctcggggtaccaagacaccgatcaacagaaaccagctgtcccagaaccggggactggggggcattatggtgaaacgggcctatgagactatggcaggggcaggggttcctttctctgccaatggaaggcctctggcttcagggattcgttcaagctcacagccagcagccaagcgtcagaaactaaacccagctgatgcccccaatcctgtggtgtttgtggccacaaaggataccagggccctacggaaggctctgacccatctggaaatgcggcgagctgctcgccgacccaacttgcccctgaaggtgaagccaacgctgattgcagtgcggccccctgtccctctacctgcaccctcacatcctgccagcaccaatgagcctattgtcctggaggactgagcacctgtggggaagggaggtgggctgagaggtagagggtggatgcccagggcacccaaacctcccttccctttcgtgtcgaagggagtgaggagtgaattaaggaagagagcaagtgagtgtgtgtccctggaggggttgggcgccctctggtgttaccacctcgagacttgtctcatgcctccatgcttgccgatggaggacagactgcaggaacttggcccatgtgggaacctagcctgttttggggggtaggacccacagatgtcttggacagttttggggggagggttttttaattttttaaaagttttgcctccctttgtgaaaggggatggggaggggaagagtaaacagataacaggtggtggtacctggttgggggaggggggcgtgcactgccatgtctttttttttttttttttttttttttttcctaattgggggtttctctttctgtccggtgtccggactttcctaattggagtttgaggcccctaagctggcatcaaccccaggccacgctcgctctttccttccctcccctccccctctgccttttgtacgccagttctcagaaataaagatcttttgtccgtttttttaacctcggattctgtaattggttcttatagtaacaaataaaaagctgttttcttcagcttctcctgg

SEQ ID NO: 61 - DNA, 10996 bp, Homo sapiens
  human ring finger and CCCH-type zinc finger domains 1 (RC3H1), roquin cDNA
ctttttttcaaagattttgattccagtggaatctttgctttagatttgtgtgtgtgtttgtgttcgtgaattgtaactccagaagcaatgcctgtacaagctccacaatggacggatttcctctcctgcccaatttgcactcagactttcgacgaaacaattcgaaagcccatcagtttgggttgtggccatactgtctgcaagatgtgcctgaataaactccaccgcaaggcttgcccatttgaccagaccactatcaatacagacattgagctcctccctgtgaactcagcattgctgcagctcgtgggtgctcaggtccctgagcagcagcctattactttgtgtagtggggttgaagacacaaagcattatgaggaagccaagaaatgtgtagaagaattagcattgtacttaaaaccgctcagcagtgctagaggagtgggtctgaacagcactactcagagtgttctgagtcgcccaatgcagaggaagcttgtgactctagtccactgtcaactagtagaagaagaaggcaggattcgtgccatgagggcagctcgatctttaggtgaacgaacagttacagagctcattctccagcaccagaatcctcagcaactctcttccaatctttgggcagcagtaagggctaggggatgccagttccttggaccagcaatgcaggaggaagctttaaagttggttctgctggccttagaagatggttctgctttgtcaagaaaagtattggttctgtttgtggtgcaaagattggagccacggtttcctcaagcctctaaaactagcattgggcatgttgttcagctcctttatagagcctcctgtttcaaggtcaccaaacgtgatgaagactcttctttgatgcagctgaaagaagaatttagaacctatgaagctctgcggcgagaacatgactcccagatagtgcagattgctatggaagcaggcttacgaattgcaccggaccagtggtcctctttgctttatggagaccagtctcacaaatctcatatgcagtccattattgacaagttgcagactccagcctcttttgcacagagtgttcaggaactaacaattgctctccagcgaactggagacccagcaaacttgaaccgactaagaccccatttggagctgttagcaaacattgaccctagtccagatgctcctcctcctacttgggaacagctggaaaatgggctggttgctgtgcgtacagtggtacatgggctggttgattatatccagaaccacagcaaaaaaggagcagatcagcagcagcctccacagcatagcaaatacaaaacatacatgtgtcgagatatgaagcagagaggaggatgccctcgtggggccagctgtacatttgcacactcacaggaggaactggaaaaatttcgtaaaatgaataagcgcctggttccgagaagacccttgagtgcctctttgggtcaacttaatgaggtgggcctgccttcagcagctatccttccagatgaaggtgcagtggatctccctagcagaaaacctcctgctctgccaaatggaattgtatcaacagggaatacagtaacacagcttattccgcgagggacagaccccagctatgattctagtctgaaaccaggaaaaatagatcatctgagcagtagtgctcctggatcccctcctgacctgctagaatctgttcctaagagtatttctgccttacctgtgaatccacattctatacctccaagggggccagcagatctgcctccaatgcctgttaccaaaccacttcagatggtacctcgaggttctcagttatatccagcacaacagacggatgtttattatcaggatcctcgaggagcagctccgccatttgaaccagcaccttatcagcagggtatgtattatactccaccaccacaatgtgtgtcccgctttgtccgacctccaccatctgctcctgaacctgctcctccctacttggatcattatccaccctacctccaagaacgtgttgtaaactctcagtatggcacacagccacagcagtacccacctatatacccatctcactatgatggccgtcgagtgtaccctgctccgtcttacacaagagaagagatattccgagaaagccctatacccattgagattccacctgcagcagtaccatcgtatgtaccagaatccagagaaagataccaacagatcgagagttactatccagtggctcctcatccaactcagatcagaccttcgtacctcagagaacctccttatagccggcttcctcctcctccccagcctcatcctagtctagatgaactacatcgccgacgaaaggaaataatggcccagctagaggaaagaaaggttatctctccacctccttttgcaccttcaccaaccttgcctcctacctttcatccggaagaatttttggatgaagacttgaaggtagctgggaaatacaaaggaaatgattatagccaatactctccctggtcatgtgacaccatcggctcctacattggaaccaaagatgcaaaacccaaagatgttgtggcagcagggagtgtggaaatgatgaatgtggagagtaaaggaatgagggaccagcgattagatcttcagagaagagcagcagaaaccagtgatgatgacctcatcccatttggagaccgaccaacagtgtctcggtttggtgccatctcacgaacttccaaaactatatatcagggtgctggtccaatgcaggctatggcacctcagggagctcctacaaaatctattaacatttcagattatagtccatatggaacccacggtggctggggagcttctccatattcacctcatcaaaacataccttctcagggacacttcagtgagagggagagaatatctatgtcagaagtggccagtcatggaaaaccccttccatctgctgagagagaacagctacgactagaattgcagcaattgaaccatcagattagccagcagacccagctacgtggactagaggctgttagtaacaggctggtgttgcagagggaggcaaacaccctggcaggccagtcacagcccccaccaccgccacctccaaaatggcctgggatgatctcaagtgagcagttgagcttggaactgcaccaggtggaaagggaaatcgggaagagaacacgggaactgagtatggaaaaccagtgttctctggacatgaaaagcaaactgaatacaagtaaacaagcagaaaatggacaaccagaaccacaaaacaaggttccggctgaggaccttacattgacattcagtgatgtaccaaatggatcagccttgacacaagagaatatcagcctcctatcaaacaagaccagctctctgaacctgtcagaggaccctgagggaggaggggataataatgactcccagagatcaggagttactcccagttctgctccttaaaatatgaggagtcctacttttatcttctgctcctaatcagtttgtcgggcataggggtaggagaacgcataacttctaaactttttctcttaagagcggtcagagaaatccaggaaattcaccagaggcaatgtgcacaaacaccactactaaaaacaaaccctgcacatagttcacattaatgcatttttttaatttaaagaaaaagaaaattagcagtatctgcaagcaattcagattaaatttgtttttgttctgtgaatgaactttattttaataactttggacgccttggatccagggctttaaaaaaaaaagatattatatatacactctgtttgattaattgtatgatcttaatgaagtaggttttcttgtattttggtattacatacccagtgtataatttgtataattcctcacccccaatccttatcaattctcaccaccccataaacttaaaacagaccaaaaatgtcagctttcagagaattctgtggtgcttgagaaacagacagtactagactgagttattagaaaatgtgcagcaaaccaacttttcccagagctgttatttggaattctttatccctttctagatcactagcttcattggatacgtatatttttcttgacattgaagctttttgtttgtttgggagggttttatttcttgtttttattttcaacttttcaaatagaattaccaattttgaagtcctcattttcatattaaggatcatttgcattctcttaatataatcagaaagctgattcagtgtttaattagatttaaatgttgatcaagaattaactgtaacttactagcactgaaaatacatgtttggtgtttcgcctgcgttcagctcatggttggaaatttgaagcagtgcttttcaaattaaacttttgctgacatcataggatgctaaaaaacaaggacaatcaactatgttttaaaactgcaacatttgatttgaacttaaaatgaatagagccacattattttaatggatgttttgttttacttgtgaactgattgagtcttaaggatagtttatgaattgatcacttgttgctcagaatcattagtataagtaggtaggaaatagtttgaagtcatttttcatagacttaactgtccaatgttgcaaatgtttcttcatgaaaatattgaaaagagtaaggttttttttttttttaattctgctgcacatattctgatgccatgtgtctgtgcttaattaactaagaccctataaaacgtgtttagtggggactgtttgatatagttgccctctccattcctctatttgcctgatttttttcagtttccctttctgtattttactactaaattagaaagcactggttatgtaataagttactacattgctttggttgagtaaaaacaagagtttatatttttcttgtttcttattttcttaacccttaactcctgctgaggtcataacaacctcagtctaagctctgtgtccatcatactgttaacttaaacaaatgggtggtgggggtgggaagggtaatacagtcctgccattgcctaccagtaggagagtccaaacagaacactcttttgagtagcaattatttaatttgcccagtcaaggcaccgtgtttatatactatttcacattgaatttgattatgccctacagacctggctggtcaaggatttgatatacacatattggcttgggattcgagctttcttttttatttaaataaaaatttatatatatattatatatatacatatatacatagctatatctgtatatatattgggtatgttttaaggattttttcgcatgagcgcagctgttgcgataaattgaccgattgggaggtggtagaagcactgaatgaaggtgaggctttttttttttccagttttcttatacatttgtcttctttttttaaaaaaaaaaaaaaaaatatatatatatatatatatatatatatatatgtatgctttttcttttttttttggcttttgtttgctttttgacttttacttaaaacccttttacatttccactttaaatgcctattgtttattgggagaaggaaagaaacttttgtatgtctgacagagtcccaagatttttcatttctctgcataacagtaaaaggcaacattattggcctccaaccttctttttttttttttttttttttttttggagagggagtctgcttctgttgcccaggctggagtgcagtgggttgatctcggctcgctacaacctccacctcccgggttcaagcgattctcctgcctcagcctcctgagtagctgggactacaggcacgcgccaccacgtccagctaatttttgtactacaaccttcttataagcagatttggactgatcttctcctttgggtatgtcagatcatcctaaattttagaagcagttgattcactttggaattcagaatgattcttgtattagaagataatttgtgggtattaatttttgtttaagtttaaaataaaagtaaagattcattttggatatcagttgaaaccccttagtaactcagtttctgttattcttgttctcatttcctttaaatacacttgttcttggcttttgccattttgattctgtgaagtaggcaggagcagggattaatttatacagtattcctgttctgaacaaaaccagaaaagtcactgtataaacttgacttaaaatagtatctttctcttttcatgtattttcatttgggggaaaaaaaatctctttaattgtaacctgaattcaagctgtacccctccatggtcctacactctagagctaatctggttgggcagaaaggcagaaggatggtatattgtcccattgtgcctataatgtattttaaattggtcattccaccttacctaatggaaattcttgcagctttcctagtgctcatcagcggttttaggaattcactaacacccccaaaatttgttttttgttttttgctttttttccttttccttttctctgtgatatcatgagcctgtaaggacaaatggcatatttgggcataactgcttgactctgtaactacttttttaaaatcaaaattgaaaaggtattaattgcttctggctttttaatttttttttttagagacaaagatgaaaccagataggaaatacagtttttatgttttctacttactaaaatattagtttcttctaaatattactttatttgtatttcactaaattccaaagcaaaaatcagatatctgagatgaacaattttgaatgggttaaggtaggagtaataagcattgtgttcactcatacataggtgagggaattttatttatagcgagaaatataaaagtattttgacttactcttttttcaaggagtcgctaggaaagggtagaagaactgagaataagacatctagattccatttctggtttatatgtagctcttttgcctaatttatatataattttgtcataagataagtccagtaactgtcctgtcttagataacgtacagaggctgaagtgaccaaagatccattccttattacttttctaattaaaagaagagttagctagatttctagtagtagtattctagatattgataagacattattcctaatgccaactacaaatattcaactactcagaatgtatttaaaaaattgtttggtacagcattaatgttggtgattcctttctcccatcttatttcccttcccttctattctttcccatgtatttcttttgcctaaaagaatattggtatgattctcatttgctactttgagtatataactccatcagactttccagagttcttcagggatggagctcaaagtttacatttttccatatatgtctttttttttcttgacctttttccaccctgtaatttccccttgacttacccactgccctccccaatctgcaacagtgacagtttgctgcctcaaaacagagcattcaaatgaattcgcttagccaataacttctgtgaagttgccttttctaatggtgttattactcagtgatgcacaaatgtggtatttgccctactggtaggcaaacaaaggtctggttaagaatggtaacctgctgttttctttaaaggagagccaaagacttgtgctttactctgttttggttttgggggaagtagtagccattttgatcatgaaaccttttagtatttgtgagttgattgtactgtgtaagtagatttatctaaagttaactgttaaagttagctagccttataaaatgtaaaagtaatgaaaattcatcagtttctctaagccagtgaatgtcgtcttttgtaatattgtgtataagcatttgtgcccaccccagcttctgctatcactgtggtcaagtcatgggtctgagtaaaagaattcttgagtatgtgactggtgagaaataactaactatagtcagtacatgtacagattgttaaaattcaagacaaaatactttcactaaaaaaaaggattcgtctcagtaaagaagtattcagttgctgtcacttacatacaaatggtggtgggtagcagtctcaccatttttctactctctttttgctcgttttaaataattgagtaaaggttttatttgtaaaatctatctgtaaaaagcacctgtaacgatttatatgtcattgaaaggaatggcccagttactttttaggagagattaataacctacctggaaattaactgcagtgtttacttagattttttccccctaataagagtctaagtgtgttaaatttttaactgatgatatggttacagtgttgcaaggtgatctcttcccctgaaaaatctgcctatccttttaagaaaaattagacctactaaactaaagcaaattttactttcatcattagcacctaaacaagcaagcagtctactactgtcatcattttacctgagtgcccattttgctgatccacattcatacctttctaccttggacagctatgatttttatatttatttgttgcttcagctcaggtttatgaaattttcctgctgaaatgacttattgggagttgtaggttgattatagttactattaaacattttctcaatttagcttttctgagccacttcaagaagaaagctgtttttgtcaaaaggtactattaattgtagcaagtaaatcttaagatttgaatttttaagattttatttctgtgttcactaaagatctttccacaagtaatagattataattgataagtaatactagctatagtgttaataaagagtaagactatcaccaccaggaataagtaacaccttttaataataaatctattcctaataggtatgttttcaatactgcactgaacaaagtgggtaaagagccctttgaaatcttattgtaataaagggacttacctcaccactggaatccttgttttcagagcctctggattttcagccaaacactgaatttctcctaaactttatccctgaaacatccctagagaacgaactttattttcacaagaaaataaggcacaataagggggaagaacttaaacctcaacataatatcgtgtccaaaaatgtgtatttagaaaaataaaatcctgtggagtttgttatcctaatgtttattttatactagataaggtgacttgttttcttgtattgaggtcttactgtttcagatttgtttttgtttctgttctaactctaagcagacagagctcacaagtctttggcatccattttaggttgtacactcagagtcatcttataactggaaactgtcaggtggtcccccaccccagtgagtgtatgaaagagtcaagaaaaagattggaaacaaactattgggtgaataattggttgctctattattattattattattatttgcctttttttaatcaccatttatttgtgtaatctttctccattgattggctgtcattcttataatatctgaactaccccataaaataattctctgacttaaaggcatttagcttttgcttatcgtttttacatcctctattcaactaagacactgtcttgagagttattttttccagatggatcgttggcctaaattttcacacttctcccctgttcatcctttttcctcttccctgcttcctgggaataaaaggaacttttttaaaaaaattaattagtccacaggtctcattatctttctttatgattaatctatgactttttggtacaagaacaatggaaaaagtgaattaaggtaatgaacaaaacctttcacccacttaaacattttccagttttgagattcctcttcgtgtttgtggtgtcttccccttgttaccccttctgccctttttctctgactatggtaatttggtctttaggctcatatcagtctccccgagacattctgcagtcattatcacctttttgggtggattttattttgttttattttgttttttttaaaaaaataactttttaacattggtgcatatttgcttgggatagagcttgtgtaatttaccaatcgtattgattgtaagtgattgtgccctgcagaggtatatttaacaagacaaaaataatcttggttaataaaggagcccatgagatttgagtcaggttgtaagtgaaatcacttacacttttggatagaatttatactcctgctcttataaatcagtggtagacttaccattttttaaagttttcttgcatttttttgtttttttattgccacagctccctattctttcttgcctgcctccacccccctgttcaggaaaaaaaaaaattgagccttaaagtgacagctgattttttaattgctgaattttgtgaaattttactttttccaagtgtttccaactttaaaaagagaagtgaagacaaataggttggaatggtgaagacaaatggattggaatttcacaggctgtgaataattccttaggatctggcaaaccgtgaagtcttatttgaagaccttatctcctgagagttcttttggagtaggaaaaagaaccctatttgaaatagaccgtttttctcttgtttttaatctgtttaatatttctgatttttaagcagctttcaaaacaagtgtggtggaaaaaaagaaatagtagtaggaagatgtttagggcagcagaactctgggtctaaataagtacatgttcccacttgttgccgatttttgagagtactagggccatctttctcaattttgtattatttgtgtgcatgtttatatcaaagatgcccattttgttaaaatgctatttcctttattaccttggaaactgactcagcctcatgttgctcctaattagtgtttaaggctcccatgagttgcagataaaatgatttattttaacaagtagaaggaggtgattcaccttttggattgtaaatatatgaaaatgtctacaaggtctttatctgctttctgtcagcatttatattaaatgataaattaatgaggaa

SEQ ID NO: 62 - DNA, 4253 bp, Homo sapiens
  human hypothetical protein LOC23065 precursor (KIAA0090) cDNA
ggtgcatgccgggacggcggtgggtggtgcatgcgctcgcatcatggcggctgagtgggcttctcgtttctggctttgggctacgctgctgattcctgcggccgcggtctacgaagaccaagtgggcaagtttgattggagacagcaatatgttgggaaggtcaagtttgcctccttggaattttcccctggatccaagaagttggttgtagccacagagaagaatgtgattgcagcattaaattcccgaactggggagatcttgtggcgccatgttgacaagggcacggcagaaggggctgtggatgccatgctgctgcacggacaggatgtgatcactgtgtccaatggaggccgaatcatgcgttcctgggagactaacatcgggggcctgaactgggagataaccctggacagtggcagtttccaggcacttgggctggttggcctgcaggagtctgtaaggtacatcgcagtcctgaagaagactacacttgccctccatcacctctccagtgggcacctcaagtgggtggaacatctcccagaaagtgacagcatccactaccagatggtgtattcttacggctctggggtggtgtgggccctcggagttgttcccttcagccatgtgaacattgtcaagtttaatgtggaagatggagagattgttcagcaggttagggtttcaactccgtggctgcagcacctgtctggagcctgtggtgtggtggatgaggctgtcctggtgtgtcctgacccgagctcacgttccctccaaactttggctctggagacggaatgggagttgagacagatcccactgcagtctctcgacttagaatttggaagtggattccaaccccgggtcctgcctacccagcccaacccagtggacgcttcccgggcccagttcttcctgcacttgtccccaagccactatgctctgctgcagtaccattatggaacgctgagtttgcttaaaaacttcccacagactgccctagtgagctttgccaccactggggagaagacggtggctgcagtcatggcctgtcggaatgaagtgcagaaaagtagcagttctgaagatgggtcaatggggagcttttcggagaagtctagttcaaaggactctctggcttgcttcaatcagacctacaccattaacctatacctcgtggagacaggtcggcggctgctggacaccacgataacatttagcctggaacagagcggcactcggcctgagcggctgtatatccaggtgttcttgaagaaggatgactcagtgggctaccgggctttggtgcagacagaggatcatctgctacttttcctgcagcagttggcagggaaggtggtgctgtggagccgtgaggagtccctggcagaagtggtgtgcctagagatggtggacctccccctgactggggcacaggccgagctggaaggagaatttggcaaaaaggcagatggcttgctggggatgttcctgaaacgcctctcgtctcagcttatcctgctgcaagcatggacttcccacctctggaaaatgttttatgatgctcggaagccccggagtcagattaagaatgagatcaacattgacaccctggccagagatgaattcaacctccagaagatgatggtgatggtaacagcctcaggcaagctttttggcattgagagcagctctggcaccatcctgtggaaacagtatctacccaatgtcaagccagactcctcctttaaactgatggtccagagaactactgctcatttcccccatcccccacagtgcaccctgctggtgaaggacaaggagtcgggaatgagttctctgtatgtcttcaatcccatttttgggaagtggagtcaggtagctcccccagtgctgaagcgccccatcttgcagtccttgcttctcccagtcatggatcaagactacgccaaggtgttgctgttgatagatgatgaatacaaggtcacagcttttccagccactcggaatgtcttgcgacagctacatgagcttgccccttccatcttcttctatttggtggatgcagagcagggacggctgtgtggatatcggcttcgaaaggatctcaccactgagctgagttgggagctgaccattcccccagaagtacagcggatcgtcaaggtgaaggggaaacgcagcagtgagcacgttcattcccagggccgtgtgatgggggaccgcagtgtgctctacaagagcctgaaccccaacctgctggccgtggtgacagagagcacagacgcgcaccatgagcgcacctttattggcatcttcctcattgatggcgtcactgggcgtatcattcactcctctgtgcagaagaaagccaaaggccctgtccatatcgtgcattcagagaactgggtggtgtaccagtactggaacaccaaggctcggcgcaacgagtttaccgtactggagctctatgagggcactgagcaatacaacgccaccgccttcagctccctggaccgcccccagctgccccaggtcctccagcagtcctatatcttcccgtcctccatcagtgccatggaggccaccatcaccgaacggggcatcaccagccgacacctgctgattggactaccttctggagcaattctttcccttcctaaggctttgctggatccccgccgccccgagatcccaacagaacaaagcagagaggagaacttaatcccgtattctccagatgtacagatacacgcagagcgattcatcaactataaccagacagtttctcgaatgcgaggtatctacacagctccctcgggtctggagtccacttgtttggttgtggcctatggtttggacatttaccaaactcgagtctacccatccaagcagtttgacgttctgaaggatgactatgactacgtgttaatcagcagcgtcctctttggcctggtttttgccaccatgatcactaagagactggcacaggtgaagctcctgaatcgggcctggcgataaagaacaaagactgtgcctaaaagtggagagccaggggagtgtgggtcagataagcagctacagctgcagtttggtggattggtggagtatgtgtgtgtgtcagtgctcagctaagaactgtagggaagatggatgaccttcacgcagaactccttttgggatatacatgatgcagaaaggatcctacatggagagagacagaactctctcagctgacactctcagagattcctgatgggctttctcttgaagtccaaaggcgtctgcattgtttcctttctttgcccatccatgaatgttctgttttgttttttttaataagaattccggctgatttttgtgaggcctgtttaaattgactttactttgccttttgtgtttctcaattttatctagaaatctttctgactttttccatctcttgcttcaaagtaagaggggaactctccttgccgactccaccttataggtacatttggtgttttgcactgggaagaaataggatccatccttagctgaggcttgaggactgatccagcctctcatggcttccctccaaagtaacttagggttgagggatctatatgtgatgtcaaaacttactttaaacctctagtttcgtgctgtcatttattaggctgggccaccaaatctttgtttcaatttatcagaagccaagtgcatactagcgtcttgtttgttgcccattgcctatacttttcacctgagatgtgtgagttggggccttttaaaaactactgaattgtctgagccttgaagacatttccagggagaagagataatctctcatttcacccacaggctggtctaatcataacctagttaaagatgtccttgtttaagaaccccattatttatttttagtttttaatataaattaacatgtgggtcattatatttctccttaaatgaggaaattttaaattttattgatctaacctttgaagctttaaaaaaggagaaagagggtaggggtgggaaactggcatactgtgtgtatagcactgccgattggctaggccactgtgtctctgctacaaattaaagaaatcctaaaagttttccttggtcatagagttggggaatgacagaatttttctttgttgtgaaatgtatgtacagagtagaccatctctagccctgtggtgaaagaggtacactcgaatgtttgcataaagcaagtgacaaatgaaaaaaaaaaaaaaaa

SEQ ID NO: 63 - DNA, 2592 bp, Homo sapiens
  human eukaryotic translation initiation factor 2, subunit 2 beta, 38kDa, eukaryotic translation initiation factor 2 beta (EIF2S2) cDNA
aggcgcatttccaacgcttggaggagagggcggggtgtcgtttcctttcgctgatgcaagagcctagtgcggtggtgggagaggtatcggcaggggcagcgctgccgccggggcctggggctgacccgtctgacttcccgtccgtgccgagcccactcgagccgcagccatgtctggggacgagatgatttttgatcctactatgagcaagaagaaaaagaagaagaagaagccttttatgttagatgaggaaggggatacccaaacagaggaaacccagccttcagaaacaaaagaagtggagccagagccaactgaggacaaggatttggaagctgatgaagaggacactaggaaaaaagatgcttctgatgatctagatgacttgaacttctttaatcaaaagaaaaagaagaaaaaaactaaaaagatatttgatattgatgaagctgaagaaggtgtaaaggatcttaagattgaaagtgatgttcaagaaccaactgaaccagaggatgaccttgacattatgcttggcaataaaaagaagaaaaagaagaatgttaagttcccagatgaggatgaaatactagagaaagatgaagctctagaagatgaagacaacaaaaaagatgatggtatctcattcagtaatcagacaggccctgcttgggcaggctcagaaagagactacacatacgaggagctgctgaatcgagtgttcaacatcatgagggaaaagaatccagatatggttgctggggagaaaaggaaatttgtcatgaaacctccacaagtcgtccgagtaggaaccaagaaaacttcttttgtcaactttacagatatctgtaaactattacatcgtcagcccaaacatctccttgcatttttgttggctgaattgggtacaagtggttctatagatggtaataaccaacttgtaatcaaaggaagattccaacagaaacagatagaaaatgtcttgagaagatatatcaaggaatatgtcacttgtcacacatgccgatcaccggacacaatcctgcagaaggacacacgactctatttcctacagtgcgaaacttgtcattctagatgttctgttgccagtatcaaaaccggcttccaggctgtcacgggcaagcgagcacagctccgtgccaaagctaactaatttgctaatcactgattttgcaaagcttgttgtggagatgtggctggacaggtttgccatcagagtggatataccgttgtattaaaaacaagataaaaaagctgccaagatttttggcgagtggttggtctgaagtccttgcaagacgctgatgctcaagctgttgacatactcattgcctactttaacacctgtcagagaaacgtgatatggggtaaggaggtgcttttttaaaatcgttcatagacttctgtaaaatgcaagataaattaaagttattataacagtgattctttcaatttggtttgtccttcagttttcttttctataaatgtgcttggtgaaatcagcaagaaaccaaccatataaaacagtgtgtgccgggctctgactgagaaactgaacaatggcaggcgcttcatctgggcagccatttttcttctctgcttctcttgagatacatagttaaagtagacacggcctcccacgcgagtgtggtgggaccttgagacttaggaggattgcctgttttcagtgtccagggaatgactccatagatttgaattcttttccgtatgtggggatggttgctactacctcaccgccaagtcctcccccagctgttaccacatgagggaatacaaggtgctaggtaccctccttcctcgttggccactaagaggtcttagaaacatagcctgtaaatgtgtcttgtaactggcacactaaaaaagatcctagttgagcatctctcttggtgaggaagcgatgtgtgtgcggttcaggaaactcctccaagaggaggaggagtccaaacagggatgccagaggaagctttccgttttcctagccaacttgtgttctgggtttgaaaaagacccaccacaaatgctttttctattttctgatttaaaagtcgcttttgaatatgaccatgagaaaccaagaaatgctgcttgtgtggtgctctgcttcctgaggatttggctggaaggggattctccgctggcacatgggagaaggccatcttctgtgtcggtgctgtgatctgccttgttctcacttgctgaggataagggcatacacgctgctcctcgctttcttgttgcccgacttcgtactaagcagctcaggagcagtcactcagacccaaatgtcttgactgtgttgtttttaatcactgtgacccttaaagtacaggccaagtgttgtcaaacaccttggctaaaacagtggagggtgatgggtaaagcagtagagggccctcaacccacacactggctgaaactgccaccaactgccacgatgaacccaactgctgtttatgcccccattttcctttttttgtatctacacccacacgattcccaatgttggatatttctacatgaataaagcaaggatcagtgcctcttatgtaa

SEQ ID NO: 64 - DNA, 2154 bp, Homo sapiens
  human MAP6 domain containing 1 (MAP6D1) cDNA
ggaggcgcggccgggagcgccgcgcgccgggagcggggcggcgggcgccggggctggcatggcgtggccctgtatcagccgcctgtgctgcctggcgcggcgctggaaccagctggaccgctccgacgtggcggtgccgctcactctgcacggctactcggacctcgacagcgaggagccgggcacgggcggcgccgcctcgcgcaggggccagcctcccgcgggcgcccgggattccggccgggacgtgccgctcactcagtaccagcgggacttcggcttgtggaccacgcccgccgggcccaaggatccgccgccggggcgcggaccgggggcgggcggccgcaggggcaaatcctccgcgcagtcctccgcgccacctgcgcccggcgcccgcggggtctacgtgctgcccatcggcgacgcggacgcggctgcagcagtgaccacgtcgtacagacaggaattccaggcttggactggagtgaagccctcaagatccacaaagacaaaaccagcccgagtcatcacaacccacacttcgggatgggacagcagccctggggccggcttccaggtcccagaggtgaggaagaagttcactcctaacccctccgccatctttcaggcctcagctccccggattctcaacgtgtgactgcctgcaccgtgacaccatggctgccgacaggacagggctggggagcggcctcaggacccactgccgcggggctgggcgagagcatggcatgggcccctgcgggagggcacagcccctctcaaagctgtcaccagggccaaagtgctggtgtggagcagatgcaccgatggacttggcacacccagctcagcctcaagcatcctcttgagaagcctgtggaaggctcctgcgttcgttaactgccatctggccgtctctcagttttgaaatctctgaggagcctgaggatcaagtcagttgggaaccgaattggtccatggaagctgaggaatgtggacacatccggcccttgaaagaaccagttatgtccacttttggtggatttcccaggatgcgtgagcacttgattaatttcataacctacagtgagacccttggctcttcctacaaatggcccctgcagttgaagctgttggaatcttgggccgtcacctgcatgactcatggtgatgctgagtatccaggaggaaatttccagaagaaacagaccgtcagtcacgggcttccacttcacagacctccttatggccaagatgagcctcatgttttaacaaaacagttcttgggattgaatgactcacatttaccttgtgctaggttctaaagattgaatccacattttgttactaatgattttcccgctaacataaggatgatgagcagggcactatcatacacactggctgagaactggaactgtttttgggaaggtggcatttgtctcattccctgaaataccttaaaatgtcctctacaccaacccttccgtctaccctgctcacatgtacagtgacggggaactcaccaccttttgaagaggcagttcattttctttgcaaagctctctcctaacttcctccgtaaattccagccagcatggccacatgggtcacgcctggtgccttcacacgtttgaggggtcttcgtctctttttaaagcttagaggtacaagctcaggacagtcttcagtaaggaaatttgtggatttccctttggatctttcttcctctccagcccacaagtggctctagtgagacgagcatttaagctgcaggtggtggcactcgggtctcagagccaccagacgtgcaggtgggacagtggttccagctccgactgcctgtcagcgtccctcccaggtgctagccctggcaggcacagccctcccctcatgccagcaaaggaaatgctcttgatgagaggctcgctttaaagaagcccaaagcgtgtgcttatccaaggggttcagctattcctgacttcacggcttgcatgtttgatttttctaagagaaaagaggctgcctgctgggtgtctgtggaaatgagattaaaaactgtacaatctcagattttactaaaatgcaaaaatgtagtttcagtttcttaaattataagcacgagtcttctcacgcttaaaaaaaaaaaaaaaa

SEQ ID NO: 65 - DNA, 939 bp, Homo sapiens
  human olfactory receptor, family 2, subfamily M, member 7 (OR2M7) cDNA
atggcatgggagaatcagaccttcaactctgacttcctcctcctgggaatcttcaatcatagccccacccacaccttcctcttctttctggtcctggccatcttttcagtggccttcatgggaaactccatcatggttctcctcatctacctggatacccagctccacacccccatgtacttcctcctcagccaactgtccctcatggacctcatgctcatctgcaccactgtacccaagatggccttcaactacttgtctggcagcaagtccatttctatggctggctgtgccacacaaattttcttctatatatcattgcttggctccgaatgctttctgttggctgttatgtcttatgaccgctacactgccatttgccaccctctaagatacaccaatctcatgagacccaaaatttgtggacttatgactgccttctcctggatcctgggctctacagatggaatcattgatgctgtagcgacattttccttctcctactgtgggtctcgggaaatagcccacttctgctgtgacttcccttccctactaatcctctcatgcaatgacacatcaatatttgaagaggttattttcatctgctgtatagtaatgcttgttttccctgttgcaatcatcatcacttcctatgctcgagttattctggctgtcattcacatgggatctggagagggacgtcgcaaagcttttactacttgttcctctcacctcatggtggtgggaatgtactatggagcaggtttgttcatgtgcattcagcccacatctcatcattctcctatgcaggacaagatggtgtctgtattctacaccatcgtcactcccatgctgaatcctctcatttatagcctccgcaacaaggaagtgaccagagcattaatgaaaatcttaggaaagggcaagtctggagattga

SEQ ID NO: 66 - DNA, 3308 bp, Homo sapiens
  human family with sequence similarity 22, member A (FAM22A), hypothetical protein LOC728118 cDNA
ggatttctggtctcggtgctgtaggtcacatagccactctttcctggattgaggctttccagcaaaggggctgggacgtaaggctggcctgctggtgtggacagagattccagcaacatgcatgacctgggggtacaaggattgcttcctaaacaatgataagcacacagccacctaatagtctggatcggctgagaccatcctgatttcaaacacccagtccccttgccttcctaagaacccctgtgtttctcagactgaaaatgtgttttgaactttgttcacgaagtgaggccgctgttgaaattcgtcaagactgggaaagagccaaagtgggaaggagcatgggttgattggcacaaaagtaggtctgctgataaagaatggaagtaaaggggccatcaggtagaagcttttgctgtgagtcagaaggacaatttaaaagttgcctaaagaggcacacgccatctctgctgctgccttccagttggaagggaaactcaggttcttgcctaatggccaaagcccttcacagaatgtcccccacccctaacagctgcccactgcccctccccctctgcagaatgtctggggtcctatgttccaggaacctgtttactttcaaattttccctgtttcagttggactcaggagcatctggtgagccaggtcactctctgggtcttacccttggcttttctcattgcggaaactgccagacagcggtggtcagtgcccagcctgaggggatggcttcaaatggagcatacccagcgctgggaccgggcgtgaccgcgaaccctggcacctccctgtctgtgttcacggctctgcccttcaccacacccgctcccggcccagcacacgggccgctccttgtgactgcaggggctcctccaggcggccctctggtgctgtctaccctccccagcacacctctggtgacagaacaggatggctgcggcccgagtggggccggggcttccaacgtctttgtccagatgaggacagaggtggggcctgtgaaggccgctcaggcgcagaccttggtcctaactcaggcccccctcgtctggcaggctccaggcgccctctgcggaggtgttgtgtgtccacctcccctactcctggcagctgctcctgtggtgcctgttatggctgcccaggtggttgggggcacccaggcctgtgagggaggctggtcccagggccttcctcttccaccaccaccaccaccggctgcccagctgccccccattgtgtcccaagggaatgctgggccatggccacaaggggctcacggagagggcagcctggcttcctcccaggccaaggccccgccagatgactcctgtaaccccaggagtgtctatgagaacttccgactctggcagcactacaagcccctggcccggaggcaccttccccagagtcctgacaccgaagcgctttcgtgcttcctcatcccagttctccgatccctggcccggcggaagcccaccatgaccctggaggagggactgtggcgggccatgcgggaatggcagcacacgagcaactttgaccggatgatcttctacgagatggcggaaaagttcctggagtttgaggctgaggaggagatgcagattcagaaatcgcaatggatgaaggggccccagtgcctgcctcctccagccacaccgaggcttgaacctcgaggacccccggcccctgaggtggtcaagcagccagtgtaccttcccagcaaggccggccccaaggccccgactgcctgcctgccaccacccaggccccagaggccagtgaccaaggcccgccggccaccaccccggccccaccggcgagcagagaccaaggcccgcctgccaccacccaggccccagagaccagcagagaccaaggtccctgaggagatccccccagaagtggtgcaggagtatgtggacatcatggaggagctgctggggccttccctcggggccacgggggagcccgagaaacaacgggaagagggcgaagtgaagcagccacaggaagaggactggacgcccccagacccgggcctcctgagctacactgacaagctgtgttcccagaaagacttcgtcaccaaggtggaggccgtcattcatccccaattcctggaagaattgctttccccagatccacagatggatttcttggccctaagccaggagctggagcaggaggaaggactcacccttgcccagctagtggagaagcgcctcctacccttgaaggagaaacagcatgcgagggcagcccctagtcgtggcacagcccggttggactcaagttcttctaagtttgcagctggccaaggagcagagagagacgtccctgtcccccaacaaggggttggcatggaaacctgcccaccccagacgactgcccgggactctcagggacgaggcagagcacacactggcatggccaggtccaaagactctgttgtgcttttgggatgtcaggattcccctgggctgagggctgcccggccaacctctcctccccaggaccacagacccacctgccctggcgtgggtaccaaggatgccttggatctccctggagggtctcctgtcagggagtcacatgggctggctcaggggtcaagtgaggaggaggaactccccagcctggccttcctcttgggttcccagcacaagcttctgccctggtggctaccccagagccctgtccctgcctcgggccttctcagcccagaaaagtggggaccccagggaactcatcagttcccatctgctgagagaagaggcctcaacctagcaccttctcctgccaacaaggccaagaagcgacctctctttggaagcctgtcccctgctgaaaagacaccccacccagggcctgggctcagggtctctggggagcaatccctgacttgggggctgggtggcccctcacagtctcaaaagagaaagggtgaccccttggtctccaggaaggagaagaagcagcgttgtagccagtaggggcttctgagcaggctctctggggccgatccccaaggatggggctctggcatccgatgccccaaagcggtcaaaagcttcttctcccccagtgctgatcttgctgggccttagctttggagggtaggggagggaggggagggagagggtggctgaatggggagggcaggaagggagggtctggggggaaggggctggggagtgggggtgggaagcagtgcgttgggggcctcgtgtgtaagtgtgaataaatgtagttgtcttggaaaaaaaaaaaaaaaaaaaaaa

SEQ ID NO: 67 - DNA, 1521 bp, Homo sapiens
  human G protein-coupled receptor 87 (GPR87) cDNA
ttacattagcaagagagcaagttgttccagtagtcgcctggcaggagaatttgaaagggtgccccaaaggacaatctctaaaggggtaagggagatacctaccttgtctggtaggggagatgtttcgttttcatgctttaccagaaaatccacttccctgccgaccttagtttcaaagcttattcttaattagagacaagaaacctgtttcaacttgaagacaccgtatgaggtgaatggacagccagccaccacaatgaaagaaatcaaaccaggaataacctatgctgaacccacgcctcaatcgtccccaagtgtttcctgacacgcatctttgcttacagtgcatcacaactgaagaatggggttcaacttgacgcttgcaaaattaccaaataacgagctgcacggccaagagagtcacaattcaggcaacaggagcgacgggccaggaaagaacaccacccttcacaatgaatttgacacaattgtcttgccggtgctttatctcattatatttgtggcaagcatcttgctgaatggtttagcagtgtggatcttcttccacattaggaataaaaccagcttcatattctatctcaaaaacatagtggttgcagacctcataatgacgctgacatttccatttcgaatagtccatgatgcaggatttggaccttggtacttcaagtttattctctgcagatacacttcagttttgttttatgcaaacatgtatacttccatcgtgttccttgggctgataagcattgatcgctatctgaaggtggtcaagccatttggggactctcggatgtacagcataaccttcacgaaggttttatctgtttgtgtttgggtgatcatggctgttttgtctttgccaaacatcatcctaacaaatggtcagccaacagaggacaatatccatgactgctcaaaacttaaaagtcctttgggggtcaaatggcatacggcagtcacctatgtgaacagctgcttgtttgtggccgtgctggtgattctgatcggatgttacatagccatatccaggtacatccacaaatccagcaggcaattcataagtcagtcaagccgaaagcgaaaacataaccagagcatcagggttgttgtggctgtgttttttacctgctttctaccatatcacttgtgcagaattccttttacttttagtcacttagacaggcttttagatgaatctgcacaaaaaatcctatattactgcaaagaaattacacttttcttgtctgcgtgtaatgtttgcctggatccaataatttactttttcatgtgtaggtcattttcaagaaggctgttcaaaaaatcaaatatcagaaccaggagtgaaagcatcagatcactgcaaagtgtgagaagatcggaagttcgcatatattatgattacactgatgtgtaggccttttattgtttgttggaatcgatatgtacaaagtgtaaataaatgtttcttttcattatccttgcttgagcccatcaaaa

SEQ ID NO: 68 - DNA, 4890 bp, Homo sapiens
  human 20S rRNA accumulation, homolog (S. cerevisiae) (TSR1) cDNA
cgccacgggggtcgctgtcatggcaacgcacccgctcccgcatggagggcgcgaagccgcattgtgagcgctggccctggagcccgcggccccgcggctgagagcgagcctcggtcccgctgaagctcccctgacttctgcctgctccctctcccgacgggacggaaagggccggggctcgggcatggggtcccctgcggtccgagcctgcccacggcgaagccggtgcagcctggccccgtgacccctctgaatccccgtccggccgtcgccgtgcagttgtcaagtttctgggaagattagtgggagcgcagccgcccgagcccgacggccggagggtcgcggccagtcccccttgccgggtcgccacgtcccacaaggtccttcccggccgctccgtgggaggcggggcgcaggttggagtaacagggacgggcttgagctggtacggaaccgggcaaggtgagagaagtgtcttccacgcgattcccaagcctcgctagggaatcgagggagaagaaaggttgctcagagtgataaagaacatgccgttgcaaacggaagagcaacgtgcccgaatctaggtgacaggaagggcttaggccttttcggcacgaatggagccttccagtcaacatgcttctacgtgatgcagctttatagcgcaaaaaaatgacaatgcaaggggtacaaacagccctgctagaccaacagcccgagcctcgacagtctacatccggcgccttcaagcccccaaccacacactgcgaagtgggaaaagttcccagcgcggcttggcgaacccgctaacacggcgctctcacgagctgctggaaaagaccttcgcgagagggcgcagggagtcccgctccctggagggcccgcccccttggaggggaccggaagcgcttgtcctggcccggaagcagtgctgactccgtacacgcgcgctgcggcatggcggcccaccgccccggcccgctcaagcagcagaataaagctcataaaggcggacggcatcggggtcggggatctgcacagcgggacggcaagggccgtctggcactgaaaaccctaagcaagaaggtgagaaaagaactcagcagagtcgaccagaggcatcgcgccagccagctccgaaagcagaagaaggaggcggttctggcagagaagagacagctgggtggcaaggatggccctcctcatcaggtactggtggtgcccctgcacagcagaatttccctgccagaggccatgcagctgcttcaagatagggacactggaacagtacacttgaatgaattgggaaacacccagaactttatgctgctgtgcccccgcttgaaacatcggtggtttttcacctcagcaaggccaggggatctgcacgttgtgttagacatggctaaagtagctgataccatcctgttcctccttgatccactagaaggctgggacagcaccggtgattactgtctttcctgcctctttgctcagggccttccgacctatacactagctgtccaggggatttctggcctcccactgaagaaacaaatagataccaggaagaagctaagtaaagcagtggagaagcgctttccgcatgacaaactcctcttgttagacactcaacaggaggcagggatgctgcttaggcagttggctaaccagaagcaacagcatcttgcttttcgagatcggcgggcctacctatttgcccatgctgttgattttgttcctagtgaagagaataacttggtgggcaccttgaaaatttcaggctatgttcgagggcagactctgaatgtcaataggttgctgcatatcgttggatatggtgatttccagatgaaacagatagatgcccccggagaccctttccctttaaatcctagaggaattaaaccccaaaaggacccagacatggcaatggagatttgtgctacggatgctgtagatgatatggaagaaggtcttaaagtcctaatgaaggcagaccctggtagacaggaatccttgcaagcagaggttatcccagatccaatggagggagagcaaacctggcccactgaggaggagctgagcgaggcaaaggatttcttgaaggaaagttctaaggtggtaaagaaggtccccaaaggaacatccagttaccaagctgaatggattttggatggtggcagccaaagtggtggggaaggagatgaatatgaatatgatgatatggaacatgaggattttatggaggaggaatctcaggatgagagtagtgaagaagaggaagaatatgaaactatgactattggggagtctgtgcatgatgatctgtatgataagaaagtagatgaagaagctgaggcaaaaatgttggagaaatataaacaagaaagactggaagagatgtttccagatgaagtggacacgccccgtgatgtggctgctcgaattcgatttcagaaatacagaggccttaagagcttccggacatctccatgggatcctaaggaaaaccttcctcaagattatgctcgaatatttcagtttcagaactttactaacactaggaaaagcatctttaaagaggttgaagaaaaagaggttgaaggagctgaggttggctggtatgtcacacttcatgtctctgaagtccccgtctcagtggtcgagtgcttcaggcaaggaacacccttgattgcattttctttactacctcatgaacagaagatgtcagtattgaatatggtggtgaggcgtgaccctggcaacactgaacctgtgaaagccaaggaagagctcatatttcactgtggattcaggcgcttccgagcctcacctttattctctcagcacactgcagcggacaaacataaattgcagagattcctgactgctgacatggccctggtggcgacagtctatgcgccaatcacttttcctcctgcatctgtgctgcttttcaagcaaaaaagcaatggaatgcacagcctcattgctacaggccatcttatgtcagtagatccagacagaatggtcatcaagagagttgttctgagtggtcatcctttcaaaatttttactaagatggcagtagtacgttacatgttcttcaacagagaggatgtgctgtggtttaaaccagtggaactgagaacgaagtggggccggagaggacatatcaaggaacctttaggtacccatggccacatgaaatgcagctttgatgggaagctaaaatctcaagacacagtactgatgaacctgtataaacgagtcttccccaaatggacttatgatccatatgtaccagaaccagtaccctggctgaaaagtgagatttcttcaacagtgcctcaagggggcatggagtaatggattcaaagagattctgtcttaccggtgccagtcagtactccagggatgggaggcacaagttgtgattgggcaaagtttattttctatgtcagcctgtcagtccactgccccattttgcaagacttttttttagccttgacaaaatgtctcagttaagtataaaagtttttccactacttagtccaaaaaaaactattaaatcttaatgaaatagccactctccattaagaatctgataactaagagttgacaatactaggaaacaaaatgtcttcagtatctaaagacactgaattcccaccatttccttttctgtaaattaaacagaaacagactgataagaagctggcctttcagcctgcttcacccaagttatggaggaggttaagtctacatttccaccactgagcacaatacaaatgttctttacttctggggaaacagtttgaaaatgttgagacagcacagcagccactccaacaccagctgtaggttcaatgagtagtttcatcctctcccacaccagctgggttgcacactgttgatatggaagggagtaggaattagtgaaaggggagtctagttggtttacctataaagttcagatgagaatacgtgtccagtttgaattttcttatcactgtgtacacacgcttcccaaagcttttctttaattctgactctgcttctgtcaagagggttgtcattaatacatctagggtaccctcccatgtcatgaagttacctagtcaggttcccgtgggtcacttgctactcctaagggaagtttcttctgcctaagaagttacaccatgctttgctatttcttttcttgctggagcctcaccttaatttcatcctctgtgacagtgaagatatcatccacaaggtccctgataataggccaggtgttcaagccaatgctggatttgacaccatctgctatggtttctggaggataaagattgggcatcagtttccccttcagcttggactggtagcagtcatctgcatttgagggttcagcagcatataccttcacactaggtttcagagcctgggaagaggaatattaagacatcttaacaacaaaccacaacattgcctgcatgtctaaaagaaaatatgggcctggtgtggtggctcacacctgtaatcccaacactttgggagcccgaggcgggtggatcagctgaggtcaggagttcaagaccagcctggccaacctggtgaaatgcagtgtcaactaaaaataggaaaatcagccaggcgtggtggcagacccctgtaatcccagctactcaagaggctgaggtaggagaatcacttgaacttgggaggggtaggttgcagtgagctgagatcacaccaaaatggggtggggcgcagtggctcacgcctgtaatcccagcactttgggaggccgaggtgggcggatcacgaggtagggagatcaagaccatcctggctaacacggtgaaaccccgtctctactaaaaatacaaaaaaaaaaaa

SEQ ID NO: 69 - DNA, 2612 bp, Homo sapiens
  human a disintegrin and metalloproteinase (ADAM) domain 7, ADAM metallopeptidase domain 7 (ADAM7) precursor cDNA
aaaactgcccacctatctgtgaggtgcttcatccctgcagtggaagtgaggaggaagaaaggtgaactccttttctcaagcacttctgctctcctctaccagaatcactcagaatgcttcccgggtgtatattcttgatgattttactcattcctcaggttaaagaaaagttcatccttggagtagagggtcaacaactggttcgtcctaaaaagcttcctctgatacagaagcgagatactggacacacccatgatgatgacatactgaaaacgtatgaagaagaattgttgtatgaaataaaactaaatagaaaaaccttagtccttcatcttctaagatccagggagttcctaggctcaaattacagtgaaacattctactccatgaaaggagaagcgttcaccaggcatcctcagatcatggatcattgtttttaccaaggatccatagtacacgaatatgattcagctgccagtatcagtacgtgtaatggtctaaggggattcttcagaataaacgaccaaagatacctcattgaaccagtgaaatactcagatgagggagaacatttggtgttcaaatataacctgagggtgccgtatggtgccaattattcctgtacagagcttaattttaccagaaaaactgttccaggggataatgaatctgaagaagactccaaaataaaaggcatccatgatgaaaagtatgttgaattgttcattgttgctgatgatactgtgtatcgcagaaatggtcatcctcacaataaactaaggaaccgaatttggggaatggtcaattttgtcaacatgatttataaaaccttaaacatccatgtgacgttggttggcattgaaatatggacacatgaagataaaatagaactatattcaaatatagaaactaccttattgcgtttttcattttggcaagaaaagatccttaaaacacggaaggattttgatcatgttgtattactcagtgggaagtggctctactcacatgtgcaaggaatttcttatccagggggtatgtgcctgccctattattccaccagtatcattaaggatcttttacctgacacaaacataattgcaaacagaatggcacatcaactggggcataaccttgggatgcagcatgacgagttcccatgcacctgtccttcaggaaaatgcgtgatggacagtgatggaagcattcctgcactgaaattcagtaaatgcagccaaaaccaataccaccagtacttgaaggattataagccaacatgcatgctcaacattccatttccttacaattttcatgatttccaattttgtggaaacaagaagttggatgagggtgaagagtgtgactgtggccctgctcaggagtgtactaatccttgctgtgatgcacacacatgtgtactgaagccaggatttacttgtgcagaaggagaatgctgtgaatcttgtcagataaaaaaagcagggtccatatgcagaccggcgaaagatgaatgtgattttcctgagatgtgcactggccactcgcctgcctgtcctaaggaccagttcagggtcaatggatttccttgcaagaactcagaaggctactgtttcatggggaaatgtccaactcgtgaggatcagtgctctgaactatttgatgatgaggcaatagagagtcatgatatctgctacaagatgaatacaaaaggaaataaatttggatactgcaaaaacaaggaaaacagatttcttccctgtgaggagaaagatgtcagatgtggaaagatctactgcactggaggggagctttcctctctccttggagaagacaagacttatcaccttaaggatccccagaagaatgctactgtcaaatgcaaaactatttttttataccatgattctacagacattggcctggtggcgtcaggaacaaaatgtggagagggaatggtgtgcaacaatggtgaatgtctaaacatggaaaaggtctatatctcaaccaattgcccctctcagtgcaatgaaaatcctgtggatggccacggactccagtgccactgtgaggaaggacaggcacctgtagcctgtgaagaaaccttacatgttaccaatatcaccatcttggttgttgtgcttgtcctggttattgtcggtatcggagttcttatactattagttcgttaccgaaaatgtatcaagttgaagcaagttcagagcccacctacagaaaccctgggagtggagaacaaaggatactttggtgatgagcagcagataaggactgagccaatcctgccagaaattcatttcctaaataaacctgcaagtaaagattcaagaggaatcgcagatcccaatcaaagtgccaagtgagcttgaagttggatatccaaaatggccgtgcaagcttaggctggggattctggatgcaacgtctttacaaccttacctagatatctgctactcacatttttggtagtgtttcaaacgttctttatccagacagacaatgtttaagagaaacaacttatttctgttaatatttaccggtagaattcacaccctctatcataaacatatgctgcagaaaaaaaaaaaaaaaaaaaa

SEQ ID NO: 70 - DNA, 2197 bp, Homo sapiens
  human lysyl-tRNA synthetase (KARS), transcript variant 1 cDNA
aaattaacgtactatcctccttacttttgggtcgggccctccgggaagatggcggccgtgcaggcggccgaggtgaaagtggatggcagcgagccgaaactgagcaagaagtggtggtaatcattagttccagggtgctctgccatgttgacgcaagctgctgtaaggcttgttagggggtccctgcgcaaaacctcctgggcagagtggggtcacagggaactgcgactgggtcaacttgctcctttcacagcgcctcacaaggacaagtcattttctgatcaaagaagtgagctgaagagacgcctgaaagctgagaagaaagtagcagagaaggaggccaaacagaaagagctcagtgagaaacagctaagccaagccactgctgctgccaccaaccacaccactgataatggtgtgggtcctgaggaagagagcgtggacccaaatcaatactacaaaatccgcagtcaagcaattcatcagctgaaggtcaatggggaagacccatacccacacaagttccatgtagacatctcactcactgacttcatccaaaaatatagtcacctgcagcctggggatcacctgactgacatcaccttaaaggtggcaggtaggatccatgccaaaagagcttctgggggaaagctcatcttctatgatcttcgaggagagggggtgaagttgcaagtcatggccaattccagaaattataaatcagaagaagaatttattcatattaataacaaactgcgtcggggagacataattggagttcaggggaatcctggtaaaaccaagaagggtgagctgagcatcattccgtatgagatcacactgctgtctccctgtttgcatatgttacctcatcttcactttggcctcaaagacaaggaaacaaggtatcgccagagatacttggacttgatcctgaatgactttgtgaggcagaaatttatcatccgctctaagatcatcacatatataagaagtttcttagatgagctgggattcctagagattgaaactcccatgatgaacatcatcccagggggagccgtggccaagcctttcatcacttatcacaacgagctggacatgaacttatatatgagaattgctccagaactctatcataagatgcttgtggttggtggcatcgaccgggtttatgaaattggacgccagttccggaatgaggggattgatttgacgcacaatcctgagttcaccacctgtgagttctacatggcctatgcagactatcacgatctcatggaaatcacggagaagatggtttcagggatggtgaagcatattacaggcagttacaaggtcacctaccacccagatggcccagagggccaagcctacgatgttgacttcaccccacccttccggcgaatcaacatggtagaagagcttgagaaagccctggggatgaagctgccagaaacgaacctctttgaaactgaagaaactcgcaaaattcttgatgatatctgtgtggcaaaagctgttgaatgccctccacctcggaccacagccaggctccttgacaagcttgttggggagttcctggaagtgacttgcatcaatcctacattcatctgtgatcacccacagataatgagccctttggctaaatggcaccgctctaaagagggtctgactgagcgctttgagctgtttgtcatgaagaaagagatatgcaatgcgtatactgagctgaatgatcccatgcggcagcggcagctttttgaagaacaggccaaggccaaggctgcaggtgatgatgaggccatgttcatagatgaaaacttctgtactgccctggaatatgggctgccccccacagctggctggggcatgggcattgatcgagtcgccatgtttctcacggactccaacaacatcaaggaagtacttctgtttcctgccatgaaacccgaagacaagaaggagaatgtagcaaccactgatacactggaaagcacaacagttggcacttctgtctagaaaataataattgcaagttgtataactcaggcgtctttgcatttctgcgaaagatcaaggtctgcaagggaattcttgtgtgctgctttccatttgacaccgcagttctgttcagccatcagaagagagacaaggaattaaaaatttctttttaatcctgttaccaaataaaaaa

SEQ ID NO: 71 - DNA, 2017 bp, Homo sapiens
  human lysyl-tRNA synthetase (KARS), transcript variant 2 cDNA
aaattaacgtactatcctccttacttttgggtcgggccctccgggaagatggcggccgtgcaggcggccgaggtgaaagtggatggcagcgagccgaaactgagcaagaatgagctgaagagacgcctgaaagctgagaagaaagtagcagagaaggaggccaaacagaaagagctcagtgagaaacagctaagccaagccactgctgctgccaccaaccacaccactgataatggtgtgggtcctgaggaagagagcgtggacccaaatcaatactacaaaatccgcagtcaagcaattcatcagctgaaggtcaatggggaagacccatacccacacaagttccatgtagacatctcactcactgacttcatccaaaaatatagtcacctgcagcctggggatcacctgactgacatcaccttaaaggtggcaggtaggatccatgccaaaagagcttctgggggaaagctcatcttctatgatcttcgaggagagggggtgaagttgcaagtcatggccaattccagaaattataaatcagaagaagaatttattcatattaataacaaactgcgtcggggagacataattggagttcaggggaatcctggtaaaaccaagaagggtgagctgagcatcattccgtatgagatcacactgctgtctccctgtttgcatatgttacctcatcttcactttggcctcaaagacaaggaaacaaggtatcgccagagatacttggacttgatcctgaatgactttgtgaggcagaaatttatcatccgctctaagatcatcacatatataagaagtttcttagatgagctgggattcctagagattgaaactcccatgatgaacatcatcccagggggagccgtggccaagcctttcatcacttatcacaacgagctggacatgaacttatatatgagaattgctccagaactctatcataagatgcttgtggttggtggcatcgaccgggtttatgaaattggacgccagttccggaatgaggggattgatttgacgcacaatcctgagttcaccacctgtgagttctacatggcctatgcagactatcacgatctcatggaaatcacggagaagatggtttcagggatggtgaagcatattacaggcagttacaaggtcacctaccacccagatggcccagagggccaagcctacgatgttgacttcaccccacccttccggcgaatcaacatggtagaagagcttgagaaagccctggggatgaagctgccagaaacgaacctctttgaaactgaagaaactcgcaaaattcttgatgatatctgtgtggcaaaagctgttgaatgccctccacctcggaccacagccaggctccttgacaagcttgttggggagttcctggaagtgacttgcatcaatcctacattcatctgtgatcacccacagataatgagccctttggctaaatggcaccgctctaaagagggtctgactgagcgctttgagctgtttgtcatgaagaaagagatatgcaatgcgtatactgagctgaatgatcccatgcggcagcggcagctttttgaagaacaggccaaggccaaggctgcaggtgatgatgaggccatgttcatagatgaaaacttctgtactgccctggaatatgggctgccccccacagctggctggggcatgggcattgatcgagtcgccatgtttctcacggactccaacaacatcaaggaagtacttctgtttcctgccatgaaacccgaagacaagaaggagaatgtagcaaccactgatacactggaaagcacaacagttggcacttctgtctagaaaataataattgcaagttgtataactcaggcgtctttgcatttctgcgaaagatcaaggtctgcaagggaattcttgtgtgctgctttccatttgacaccgcagttctgttcagccatcagaagagagacaaggaattaaaaatttctttttaatcctgttaccaaataaaaaa

SEQ ID NO: 72 - DNA, 1377 bp, Homo sapiens
  human C-type lectin domain family 4, member G (CLEC4G) cDNA
agtgcgtaggtccagtgagaacaggcgtgaaatttatatctctgcccaggactgggtgcctgcatcgccatggacaccaccaggtacagcaagtggggcggcagctccgaggaggtccccggagggccctggggacgctgggtgcactggagcaggagacccctcttcttggccctggctgtcctggtcaccacagtcctttgggctgtgattctgagtatcctattgtccaaggcctccacggagcgcgcggcgctgcttgacggccacgacctgctgaggacaaacgcctcgaagcagacggcggcgctgggtgccctgaaggaggaggtcggagactgccacagctgctgctcggggacgcaggcgcagctgcagaccacgcgcgcggagcttggggaggcgcaggcgaagctgatggagcaggagagcgccctgcgggaactgcgtgagcgcgtgacccagggcttggctgaagccggcaggggccgtgaggacgtccgcactgagctgttccgggcgctggaggccgtgaggctccagaacaactcctgcgagccgtgccccacgtcgtggctgtccttcgagggctcctgctactttttctctgtgccaaagacgacgtgggcggcggcgcaggatcactgcgcagatgccagcgcgcacctggtgatcgttgggggcctggatgagcagggcttcctcactcggaacacgcgtggccgtggttactggctgggcctgagggctgtgcgccatctgggcaaggttcagggctaccagtgggtggacggagtctctctcagcttcagccactggaaccagggagagcccaatgacgcttgggggcgcgagaactgtgtcatgatgctgcacacggggctgtggaacgacgcaccgtgtgacagcgagaaggacggctggatctgtgagaaaaggcacaactgctgaccccgcccagtgccctggagccgcgcccattgcagcatgtcgtatcctgggggctgctcacctccctggctcctggagctgattgccaaagagttttttcttcctcatccaccgctgctgagtctcagaaacacttggcccaacatagccctgtccagcccagtgcctgggctctgggacctccatgccgacctcatcctaactccactcacgcagacccaacctaacctccactagctccaaaatccctgctcctgcgtccccgtgatatgcctccacttctctccctaaccaaggttaggtgactgaggactggagctgtttggttttctcgcattttccaccaaactggaagctgtttttgcagcctgaggaagcatcaataaatatttgagaaatgaatccaggaaaaaaaaaaaaaaaaaa

SEQ ID NO: 73 - DNA, 16235 bp, Homo sapiens
  human polycystic kidney and hepatic disease 1 (autosomal recessive) (PKHD1), transcript variant 1, fibrocystin isoform 1 cDNA
acatttggctgggacacaaacgagttaggtgagttatagtctaacgtgagtgagttacctgcgtggtggctgcaggctgagctctaaccagataacatgtccacggattcttgacagagagaaataagatcacttagaaagaaaggatcatttctcccttgagtcacaaggagacagaaacagaaaaaaaagcacaaaagctatgctgctccaatcaaaactgaaaatgcttttaatgtctgagcaatcttaagagtattgatttaagtggacagaatgactgcctggctgatctctctgatgagtattgaagtactacttttggcagtacgtcacctgagtttacatattgaacctgaagaaggtagccttgcagggggaacgtggatcacagtcatttttgatggtttggagttgggtgttctttaccccaacaatggctctcaattggagatacacctggtgaacgtgaacatggtggtgcccgcactgcggagtgttccctgtgacgtctttcctgttttcttggatttgcctgtggtgacatgccggaccagatctgtgctgtctgaagcacatgagggtctgtacttcctggaagcatacttcgggggacagctggtaagcagtccaaatccaggaccacgagatagctgtactttcaagttttccaaggcgcagacacccatcgttcaccaagtttatccaccaagtggtgttccaggaaaactaatacatgtatatggctggattatcactggaagattggaaacttttgattttgatgctgagtacattgatagcccagtgatcttggaagctcaaggagacaaatgggttactccttgctctcttataaataggcagatgggaagctgttatcctattcaggaggaccatggtcttgggactctgcagtgccatgtggaaggcgactacatcggctcccagaatgttagcttctcagtatttaacaaaggaaagtcaatggtccacaagaaggcatggctgatcagtgctaaacaggatcttttcctataccagacacactcagaaatattatctgtgtttccagaaactgggagccttgggggaagaacaaacatcacaattacaggagacttttttgacaattctgcccaggttaccattgcaggcattccatgtgatattagacacgtgtctcccaggaagattgagtgcaccactcgggctccaggaaaagatgtgaggctcaccacccctcagccaggcaatcgagggcttctttttgaagttggagatgctgttgagggactggaactgactgaagccaccccagggtacaggtggcagattgtccctaatgccagttctccatttgggttttggtcacaggaaggacaacctttcagagcacggctcagtgggttctttgtggctccagagacaaataattacactttctggattcaggcagatagccaagcttccttgcatttcagttggtcagaggaaccaaggactaaggtgaaagtggcctccatcagcgtcggcactgctgactggtttgactcctgggagcagaatagggatgaagggacctggcagcagaagactcccaagttggagctgttgggtggagccatgtactacctggaagcagagcatcatgggatagccccaagcagggggatgaggattggtgtccagattcacaacacctggctgaatcctgatgtggtcaccacttacctacgggagaagcaccagatccgagtccgagcccagaggcttccagaagtacaggtgctgaatgtatcaggcagaggaaacttcttccttacttgggacaatgtctctagtcagccaatccctgcaaatgccacagcccatctgattcaaacaaccattgaggagttacttgcagtaaaatgcaaactggaacccctttggtctaacatccttctccggcttggatttgaacgaggcccagaagtttccaactctgatggggacctcaccagtgggacggagcccttctgtggcaggttcagcctccgtcagcctcgacaccttgtccttactcccccggctgcccagaagggctatcggctagatcagtatacacacctgtgtcttgcatacaaaggccacatgaacaagatcctgaagatgattgtgtccttcacaatcggctttcaaaacatggtaaagaataccacctgtgactggagtctcacgaggaccagccccgagagctggcagttcgattgcactgacctctgggagacttgtgtgcgttgcttcggggatctccagccccctccggcaaactccccagtgctggttcatcagatcaaccttctccctctggcccaggagacgggcctgttctatgtggatgaaattattattgcagacacaaacgtaacagtttctcaagctgattctggaacggctcgcccagggggcaatctggtggaatcagtctctgtggtgggatcccctccggtctacagtgtcacctcctggctggcggggtgtggcacggagctcccgctcatcactgcacgctctgtgcccactgaaggaacagaagagggatctggactggtcctggtgacgacacagagacgacagcggacaagtccacctctaggaggacactttcgcatccagcttcctaatacagtgatttctgatgtccctgtacaaatttctgctcatcaccttcaccagctcttacagaataatgccgatgacttcacatccaggtacctcaatgccagtgacttcactgtgaaggaggatctatacacttgctacgaacacgtgtggaccttgtcctggtccactcagattggggatttgcccaattttatcagggtctctgatgaaaaccttactggagtgaatcctgctgcagccacgcgtgtggtatatgatggtggagtttttcttggacccatatttggagacatgttggctactgccaaccagcatactcaggtggttgtgcgagtgaatgatgtaccagctcattgcccaggttcctgctctttccagtacctccaagggtcaactccctgtgtccattctgtgtggtactccattgatggtgacatcaacctaatgatttacattaccggaactggtttctctggtgactcccagttcttgcaggttacagtgaacaaaacgagttgcaaagttattttctcaaaccagaccaatgtagtctgtcagacagatttgctacctgttggaatgcatcggatcttgatgttggtgagaccctctggtcttgccatcagtgccactggagaagacctcttcctaaatgtgaaacctagactggatatggtggagccttccagagctgcggatattggagggctctgggccaccatccgaggctctagtttggaaggtgttagcctgatattatttggatcttactcgtgtgccatcaatgtcgctacaagcaattcaagcagaattcagtgcaaagttccacccagggggaaagatggacgcattgtgaatgtgactgtgatcagaggggactattctgcagttcttcccagagcatttacatatgtctcttccttaaatccagttattgtgactctgagcagaaacataagcaatatagcaggcggtgagaccctggtcattggagtggcgaggctgatgaactatacggatttggatgtggaagtccacgtccaggatgccttggctccggttcacacacagtcggcttggggcctggaggtggcactgcccccactgccagctggtctccacagaatttccgtctctatcaatggggtcagcattcactcacaaggggttgatctccacatccagtacctcacagaagttttcagcatcgagccttgctgtgggtccctgctgggagggaccatcctcagcatctcaggaataggcttcagcagggacccagctttggtttgggtacttgtgggcaatcggtcctgtgacattgtgaacttaacggaggcgagcatctggtgtgaaaccctgccagccccccagatacccgatgcgggcgctcccactgttccagctgccgtggaggtctgggctggcaacaggttcttcgcccgtggtccttcaccaagcttggtggggaaaggcttcaccttcatgtatgaagcggcagcaacaccagtagtcactgccatgcaaggagaaatcacaaatagcagcctgagcctgcatgtgggaggaagtaacctctccaactcagtcatccttctggggaacctgaactgtgatgttgagacacagtccttccagggcaacgtgagcctgtctggatgctccatccctcttcacagtctggaggctggcatctatcctctccaagtacgtcagaagcagatgggatttgctaatatgtctgtggtgctccagcaatttgcagtgatgcctcggataatggccatcttcccatcgcagggttcggcatgtggtgggaccatacttactgtgagggggttgcttcttaactctagaaggaggtcagttcgggttgacctctcgggtccttttacttgtgtgattttgagtttgggagaccacaccattctctgccaggttagcctggagggtgaccccttgcctggagcttccttctccctgaacgtcacagtcctggtcaatgggctaaccagcgagtgtcaggggaattgcactcttttcataagggaagaggcaagtcctgtcatggatgccttgtccacaaacaccagtgggtctctgaccactgtgctgattaggggtcagaggttagccaccacagctgatgagccgatggtatttgtggatgatcaacttccttgcaatgtaactttttttaatgcaagccacgttgtgtgccagacaagagacttggccccaggaccccactacctgtcagttttttatacaagaaatgggtatgcttgttctggtaatgtttccagacacttctacattatgccccaagtgtttcattattttcctaagaatttcagcttacatggtggaagcctcttgaccatagagggcacaggcctgagaggacagaacaccacgtcagtctatattgaccagcagacctgcctgacggtgaacatcggtgctgagctcatccggtgcattgttcccacagggaatggctctgttgccctggaaatagaggtagatggactttggtatcacataggagtcattggttataacaaggcctttaccccagaattgatctctatttctcagagcgatgacatcttaacctttgcagtggcccagatctcaggagctgcaaacattgacatttttataggaatgtcaccctgtgtgggtgtctctggtaaccacaccgttcttcagtgcgtggtcccttcccttccggccggggagtaccacgtcagaggctatgactgcatcagagggtgggcctcatctgccctggtgttcacctcaagagttattattacagcagtgacggagaacttcggctgcctgggtggaaggctggtgcatgtgtttggagcgggattttctccagggaatgtctcagctgctgtgtgtggtgctccctgccgagtcctggctaatgctacagtgtctgccttcagctgcttggttctgcccctggatgtgtccttggccttcctgtgtggcctgaagcgtgaggaggacagctgtgaggctgccagacacacctatgtgcagtgtgatttgacagttgccatggcgacagagcaactgcttgaatcgtggccttacctctacatttgcgaggaaagttcccaatgcctctttgtgccagatcattgggcagagtcaatgtttccatcattctcgggcctctttatcagccctaaattggaaagagatgaagttctcatctataatagctcctgtaacattaccatggaaactgaggcagagatggagtgtgagacgcccaatcagccaattaccgtcaagattactgagatacggaaacgctggggccagaacactcagggcaacttttctttacagttctgccggagatggtccaggactcacagctggtttcctgaaaggctgccacaagatggcgacaacgtcacagtggagaatggccaattgcttctgctggacactaacacaagcatcctcaacttactgcacattaaagggggcaagctgattttcatggccccaggacccatcgagctcagggcacacgccatccttgtttctgatggtggagagctccggattggatccgaagacaagcccttccaaggcagagctcagatcacactctacgggagttcctactcaactcccttctttccctatggagtcaagttcctggctgtgaggaatggaactctttctctgcacggttcactaccagaagtaattgtcacctgtcttagagcaactgcccatgccctagacacagtgctggctttagaagatgctgtggactggaaccctggggatgaagttgtcatcatcagtggaacaggtgttaaaggtgccaaaccgatggaagagattgtcactgtggaaactgtgcaggatacagacctctatcttaagtcacctttgagatattctcacaactttacagagaattgggtggctggagagcaccatattttaaaggccactgtggctctgctcagcaggagtattaccatacaaggaaatctcactaatgagagggagaagctgcttgtttcatgccaggaggccaatgctccagaaggtaatctgcagcactgtttgtattccatgagtgagaagatgctaggatccagggatatgggagccagagtgatcgttcagtccttcccagaagagcccagccaggtccagttgaagggagtgcagtttcaagtcttggggcaagccttccataagcatctgagctcactcactctggtgggagctatgagagagtctttcatacagggctgcacagtgaggaactccttcagtagaggcctcagcatgtgcgggaccttgggcctgaaggtggacagtaatgtattctacaatattttaggtcatgcgctgctagttgggacatgcacggagatgagatatatctcctgggaggcaattcatggaaggaaagatgactggtcaggacatggaaatataataagaaacaacgtgatcatccaggtttctggtgccgagggactctccaatcctgaaatgttgacaccatctggcatctatatctgcagtcccaccaatgttatagaggggaacagagtgtgtggtgctggctatggctactttttccatctcatgaccaaccaaacatcacaagctccgcttctttccttcactcagaacattgcacattcttgtaccaggtatggtctctttgtataccctaaatttcagccaccttgggataatgtcactggcaccactctgttccagagcttcacagtttgggaaagtgcaggtggtgcccagatttttagaagtagcaatcttcgcctgaaaaacttcaaagtttattcatgcagagattttggaattgacgtcttggaaagtgatgcaaatacttcagttactgacagcttattacttggtcattttgcccacaagggaagtctgtgtatgtcatctgggattaaaactcctaaaagatgggaactgatggtgtctaacacaacctttgttaattttgatctcatcaactgtgtggccattagaacctgttcagactgttcccaaggacaaggtggatttactgtgaagaccagccagttgaagtttacaaactcttcaaacttagtggcatttccatttcctcatgcagcaattttggaagacttggatgggtctctgtctgggaaaaacagaagtcacattcttgcttctatggaaaccctttcagcttcttgtttggtcaattcaagctttggtcgggttgtccatggcagtgcctgtggaggaggtgttctttttcatcgtatgtctattggtttagcgaatactcctgaagtttcttatgatttaaccatgactgacagcagaaataaaacaaccactgtcaattatgtacgtgatacattgtctaaccctcgtggctggatggctctgctcttggaccaagagacctactcattgcaatctgagaacctttggatcaacagatctctgcagtactcagcaacctttgacaactttgctcctggtaattacctactgctggtgcacacagatttgccgccttaccctgacatcctcctaagatgtgggagtcgagtgggtctgtcttttccatttcttccatcaccaggtcagaaccaaggctgtgactggttcttcaatagccagctgaggcaactcacctatctggtttcaggtgaaggccaagttcaagtcattctccgggtgaaggaaggtatgcccccaactatttcagcttctacctctgcccctgaatcagctttaaaatggtccctccctgaaacatggcaaggtgttgaagaaggctggggaggatacaacaataccattccaggccctggggatgacgttctcattttacccaacagaactgtccttgtggatacagatcttccattcttcaaagggctgtatgtgatggggaccttagacttccctgtggacagaagcaatgttctgagtgtggcatgcatggtcattgcaggcggggagctgaaagttggtactttagaaaatcccttagaaaaggaacaaaagcttctgattctccttagagcctcagagggagtcttttgtgaccgtatgaatggaattcatattgacccaggaacaattggggtttatgggaaagttcatctttacagtgcttatcctaagaactcctggacacatcttggagctgatattgcctcaggaaatgagagaattatagtagaagatgcagtggattggcgcccccatgacaaaatagtccttagctcctcttcttatgagcctcatgaagcagaggtcctcactgtgaaagaagtcaagggccaccatgtgaggatctatgaacggctcaaacaccggcatattggaagtgtacatgtcacggaggatggccgacacattcgtttggctgctgaggttggactgttgacccgaaatatacaaattcagcctgacgtatcatgtagggggagactgtttgtggggtccttcaggaagtccagccgagaagaattttcaggtgtccttcaacttcttaatgtggaaattcagaacttcgggtcaccattgtactcatctgttgaattcagtaatgtgtcagcaggatcctggatcatatcatctactctgcaccagagctgtggcgggggcattcatgcagctgccagtcatggagtacttttaaatgacaatattgtgtttggcacagctggccatggcatagatttagagggtcaggcctatactgtcactaataaccttgtggttctgatgacacagccagcgtggtccaccatttgggtggcgggaatcaaagtgaaccaggtaaaggacatcaacctccatggcaacgttgtggcaggatcagagagacttggctttcacatccgaggccacaagtgctcctcttgtgaactgctttggtctgacaatgtggcgcattcaagtcttcatggccttcatctctataaggaaagtggacttgacaactgtaccagaatctctggcttcttggctttcaagaactttgactatggtgccatgttacatgtagagaacagcgtggagatagagaacattactctggtagacaatactattggtcttttggcagtagtgtatgtattttctgctccacaaaattccgtcaaaaaagtgcagattgtgcttaggaattcagtcattgtggccaccagctcttcttttgactgcattcaggacaaagtgaagccgcactcagccaacttgacatcaacagatagagctccctccaatccaagaggaggtcgaattggtattctgtggcctgtattcacctcagaaccaaatcagtggcctcaggagccatggcacaaagtgaggaatgatcattcaatttcaggaatcatgaaacttcaagatgttaccttttctagttttgtgaagagttgctatagcgatgacctggatgtctgcattctaccaaatgcagagaacagtggaattatgcacccaataacagcagagaggaccaggatgctaaagataaaagataaaaacaagttctactttccttcattacaacccaggaaagatttaggaaaagtagtctgtcctgaattagactgtgcaagtccaagaaaatatctcttcaaggatctggatgggagagccctgggtctgcctccaccagtttctgtatttcctaaaacagaggcagaatggactgcatccttcttcaacgcaggtacatttagagaagaacagaaatgtacataccaatttctgatgcaaggattcatctgcaaacagactgaccaagtggtcctaattcttgatagcgctgatgccatttgggcaattcagaagttatatccagttgtatctgtgactagtggttttgttgatgtctttagcagtgtaaatgccaatattccctgctctacttctgggtcagtgtctactttctattctatcttacccatcaggcaaatcaccaaagtctgcttcatggatcaaactcctcaagttttgcgcttttttctattggggaacaaaagtacctccaagcttctcttggctgtattctaccatgagctccagagcccccacgtcttcttaggggaaagttttattccacccactctggttcagtcagcttccttattgctgaatgaatctattggtgccaactatttcaacatcatggataacctcttgtatgttgtcctacaaggagaggagcccattgaaatacgctcaggtgtttccattcacttggccctcactgtgatggtttcagtcttagaaaaaggctgggaaatagtaatactcgaaagactaactaacttcttacagattggccaaaaccaaatcaggtttattcacgagatgcctggccatgaagagaccttaaaggccattgctgacagtagagcaaaaagaaagcgcaattgccctactgtgacttgcactagtcattatagaagagttggtcaacgtaggcctctcatgatggaaatgaactcacatagggcttcacccccaatgactgtggaaactatctcaaaagtgattgtcattgaaattggtgattcgccaacagtaaggagcactggaatgatttcatccttatcaagtaacaaattacagaatttggctcatcgagtcatcactgctcaacagactggggtactagagaatgttctgaatatgactatcggggccttactagttactcagtcaaagggagtcattggctatggaaatacaagcagttttaaaactgggaacttgatatatattcggccctatgcactttccatcctagtccagccttcagatggagaagtgggaaatgagcttccagtgcagccacaattggtatttttggatgagcagaatcgaagagtagagtccctgggacctccttcagagccatggacaatttcagcttccctggaaggagcatcagactcagtgctaaaagggtgcacccaggcagaaactcaagatggttatgttagcttctacaacttggcagtcttgatctctgggtcaaactggcactttatttttactgtcacttctcctccaggagtcaattttacagctcgatccaagccatttgctgtcttgcctgtgactaggaaggagaagtcgaccatcatcctggctgcttccctgtcctctgtggcctcatggctggctctgagctgtctggtgtgctgttggcttaaaagaagcaaaagcagaaaaacaaaacctgaagagattcctgaatcccagactaataatcaaaatattcatatccacatctcatccaaacgccgagaatcacaagggcccaaaaaagaagacactgtggtgggagaagatatgagaatgaaggtcatgctgggcaaggtgaaccagtgcccccaccagttgatgaatggagtgtccagaaggaaagttagccgccacattgtccgagaggaagaggctgctgtgcctgctcctggtactactggcatcacatcccatgggcacatctgtgctccaggtgctcctgctcagcaggtgtacctgcaagagactgggaactggaaggagggccaagagcagttgctcagataccagctggcaggccaaaatcagctgctgctgctatgcccagacttcagacaagagaggcagcagttgccagggcaaagtcggctgagtaagcaaagtggcagcttggggctttcccaagagaagaaagcctcctgcggggccactgaggcattctgccttcattcagtacacccggaaactattcaggagcaactgtgatcagggaagttgggggcatttggcctgaaaggcagaatgttcccagtatttctggataataagctggggaagtgaggactgtcctgctgggacaactaagaagagagaatgtggactctgaatccctttttcaactttaaaatggaaaacagtcatataaatgcttacagactgaaaaatgtctcatacatattttgcagctatcatgatcctagttcaatgctaggcaaataatggcacttgttaattatttaccagtttttaacttaagcctgattttaacaacttgataatggtgtaatactgacttataccagcaggggttattattaagcattctctggattgaccacccacaatgctttgagcttcttttatagaagggatcatgaaaaggtctggtcagctacagtttaattccacactgttacagaaaagcatttctttatcctgtagtagcatttgaagggacagttcaacaccctgctccctgatctgtcagagcttaccttccaaccacaaggcaacttcctggctttttacaagtggattttatttcatggtttaaattcaatcattattgagaacctacagtagtgtgagcgtatcaaatttgcacttcatgaggatttacacatgaaaattgatattctcatgggctttgctgagagtttagttaaggacaaagatgtaaaaatgccaaatttgggaaaggaaattttgtatgaccactgttctatttttcagtgattctctctgttagtagctgggtcacatttacaactggaaaagaactacattgggagatcagagaaagccaagtggccaagtcctttatcaaaaagctgctttttggagaagatgatgcataaagctgtgatactaaggagaggagagattatgtcatatgcaactgctctaggctgtgcagggggtttaaatggagatcagaacaaaggctcacctggtattgatacatttggtaaggttgttaaaggcaatttcaccaaattcacacatttgtacggggcccatttcttttcaaactgaagaatactttaaacagcctgactgtgtccttggctctggatccagaaggccttatgctccaagcatgtaaagaaaagatcgcaggaatgtggagagcttccaaaaagagattgctctcagattttcctgaaaatcctgaaaaccaggattttccaatctctacaatgttaaggggttgttgtgtagttgcattggaagagagaaaggaaacacactctttcattgctgaattctaaataatgatgccctgaattagttctatgagaagtactggcagacagctgttatgtctgcagggcatcaaggggcaggtgtgtctcaccctactaagaattggcagaaatgttttaacctcttctttaggcatctggtgagtattgcagatcttcaggctgtccctaaaaggaggtaggtagccttctctgtggtcactgtgttggatttggaagaaaatataagtagatgttaaggtcagtgctctccaggagatttcaatccaggctatctgtgttcagggaatgatttgcaagaagttggtttatagacgtttactctggaggcacaagctggctgccatgctgagtaagtcctctttgtagatgatgtattttgcttgggcaccaacagaattaaaaacgaaaaacaaaaaaaaactcgaatgacttaggcagaacatgccttccctagtttaattagtccctgttataaccagttatttatctttttttgtagattctcggtcttgaagtcatttgcctttgcaatctctactttagtatactcattggatcctcaaagagccgtaagctttttggaaaaaaacatttcagaagtgaaggcttttgaggtttataaaatggtagcagtcttagtccttgccctgcctcagtttacctgcacatgctttctttcatttcctcggattctttcaccactttttaagttttttttccacaggtatttttcctgagctctataccatgcatttagctgcctagtgagaatatccagtaggttatcctatagttactatgaagttaacacagcccaaaaacctacttctccttgtgtttttttccaactcaatgaatgacatcactgcactcagaccagaaatctagaagtcagtcatgactcttcattctatttcgcccttcacaaagagttagctgccagctctgttatttctgccccttctttacccttcttccaatttttattatcttcttatttatcctctatgtgtcacaagaccagtctttctgggaggcatgttttatcctatccctctgcgtaggaataaccataattatcttactaattccatcccagaaaagcctgtgatccctgaggccagaattgactctttgggcctaaatagcagctataaacatcttcagtaacttgccaggctctagcatgtggcatggaattttggcatctagctaaaattcctcaacccatagttaagctactcctctttctcctaaaaaaaaaaaaaaatgagagaattagggaaacaccaaaagcaaagagagcagctctatgttcattcatgtctggagatgagccaatttgagcaccactgtaggccaactctaaatttattcagatcgttaacatgggtaacccagcaaatatttcccagcagtgacaatctacaccctttatctaaataaatattgagatgtgcttttttcctgtgttagttcaaagaatctcttcttgcctcccattgctgattttctgtattgatggactcatttctctcaagagattggacaagctaaaattctagagagttcaaaagtgtttgaaagtacattttaagtgttctcaccacaaaaaatgctagtgtgtgaggtgatacatatgttaattagttcaactgatccattccacaatgtatacatatttcaaactatcgagttgtacatgataaatatatacaatttttatttgtcaaataaagaacatctataaatatttatagatttcaaaattgagaaagaagtatatatggagccacggttgttttgaccatttctccatgctttttgtttggggagggggacattttttggggggcagggactgtgttcagggaaagtacctgaccaacagaacttcaagtctcttccagagtgcgagactcagcttatctgatcaaggtgaacttgcccttcaatagacttgcccttgttactgcccagtgaggccaccaaggaccaagaacagttgagctctctcagggccttcccctttcaacaatttagttgaatgactcccttccatctatcagtcttactccaaatatatgaaattactatacattgaaatgcctgcaaactatatgcaaaaatgagtatgaggaaatcaaatgtaaatcatatgcaaatattattcaaccaagcttctataaaattgtacgtgtcaataacagtaaagaattttaattaattctgtcatttaaaattcatgcattccatattttgctttcagaacttatagtctatgccaattttgaaaaaactataagcacaaggaattaaatactattgagtatagaactgttgatttcaacatacactatagcactttgactaattacagatatatttgatagaaaagtcacatttctacaaggtaattttcaaaaagaaataaaacatttctgtaaactt

SEQ ID NO: 74 - DNA, 11604 bp, Homo sapiens
  human polycystic kidney and hepatic disease 1 (autosomal recessive) (PKHD1), transcript variant 2, fibrocystin isoform 2 cDNA
acatttggctgggacacaaacgagttaggtgagttatagtctaacgtgagtgagttacctgcgtggtggctgcaggctgagctctaaccagataacatgtccacggattcttgacagagagaaataagatcacttagaaagaaaggatcatttctcccttgagtcacaaggagacagaaacagaaaaaaaagcacaaaagctatgctgctccaatcaaaactgaaaatgcttttaatgtctgagcaatcttaagagtattgatttaagtggacagaatgactgcctggctgatctctctgatgagtattgaagtactacttttggcagtacgtcacctgagtttacatattgaacctgaagaaggtagccttgcagggggaacgtggatcacagtcatttttgatggtttggagttgggtgttctttaccccaacaatggctctcaattggagatacacctggtgaacgtgaacatggtggtgcccgcactgcggagtgttccctgtgacgtctttcctgttttcttggatttgcctgtggtgacatgccggaccagatctgtgctgtctgaagcacatgagggtctgtacttcctggaagcatacttcgggggacagctggtaagcagtccaaatccaggaccacgagatagctgtactttcaagttttccaaggcgcagacacccatcgttcaccaagtttatccaccaagtggtgttccaggaaaactaatacatgtatatggctggattatcactggaagattggaaacttttgattttgatgctgagtacattgatagcccagtgatcttggaagctcaaggagacaaatgggttactccttgctctcttataaataggcagatgggaagctgttatcctattcaggaggaccatggtcttgggactctgcagtgccatgtggaaggcgactacatcggctcccagaatgttagcttctcagtatttaacaaaggaaagtcaatggtccacaagaaggcatggctgatcagtgctaaacaggatcttttcctataccagacacactcagaaatattatctgtgtttccagaaactgggagccttgggggaagaacaaacatcacaattacaggagacttttttgacaattctgcccaggttaccattgcaggcattccatgtgatattagacacgtgtctcccaggaagattgagtgcaccactcgggctccaggaaaagatgtgaggctcaccacccctcagccaggcaatcgagggcttctttttgaagttggagatgctgttgagggactggaactgactgaagccaccccagggtacaggtggcagattgtccctaatgccagttctccatttgggttttggtcacaggaaggacaacctttcagagcacggctcagtgggttctttgtggctccagagacaaataattacactttctggattcaggcagatagccaagcttccttgcatttcagttggtcagaggaaccaaggactaaggtgaaagtggcctccatcagcgtcggcactgctgactggtttgactcctgggagcagaatagggatgaagggacctggcagcagaagactcccaagttggagctgttgggtggagccatgtactacctggaagcagagcatcatgggatagccccaagcagggggatgaggattggtgtccagattcacaacacctggctgaatcctgatgtggtcaccacttacctacgggagaagcaccagatccgagtccgagcccagaggcttccagaagtacaggtgctgaatgtatcaggcagaggaaacttcttccttacttgggacaatgtctctagtcagccaatccctgcaaatgccacagcccatctgattcaaacaaccattgaggagttacttgcagtaaaatgcaaactggaacccctttggtctaacatccttctccggcttggatttgaacgaggcccagaagtttccaactctgatggggacctcaccagtgggacggagcccttctgtggcaggttcagcctccgtcagcctcgacaccttgtccttactcccccggctgcccagaagggctatcggctagatcagtatacacacctgtgtcttgcatacaaaggccacatgaacaagatcctgaagatgattgtgtccttcacaatcggctttcaaaacatggtaaagaataccacctgtgactggagtctcacgaggaccagccccgagagctggcagttcgattgcactgacctctgggagacttgtgtgcgttgcttcggggatctccagccccctccggcaaactccccagtgctggttcatcagatcaaccttctccctctggcccaggagacgggcctgttctatgtggatgaaattattattgcagacacaaacgtaacagtttctcaagctgattctggaacggctcgcccagggggcaatctggtggaatcagtctctgtggtgggatcccctccggtctacagtgtcacctcctggctggcggggtgtggcacggagctcccgctcatcactgcacgctctgtgcccactgaaggaacagaagagggatctggactggtcctggtgacgacacagagacgacagcggacaagtccacctctaggaggacactttcgcatccagcttcctaatacagtgatttctgatgtccctgtacaaatttctgctcatcaccttcaccagctcttacagaataatgccgatgacttcacatccaggtacctcaatgccagtgacttcactgtgaaggaggatctatacacttgctacgaacacgtgtggaccttgtcctggtccactcagattggggatttgcccaattttatcagggtctctgatgaaaaccttactggagtgaatcctgctgcagccacgcgtgtggtatatgatggtggagtttttcttggacccatatttggagacatgttggctactgccaaccagcatactcaggtggttgtgcgagtgaatgatgtaccagctcattgcccaggttcctgctctttccagtacctccaagggtcaactccctgtgtccattctgtgtggtactccattgatggtgacatcaacctaatgatttacattaccggaactggtttctctggtgactcccagttcttgcaggttacagtgaacaaaacgagttgcaaagttattttctcaaaccagaccaatgtagtctgtcagacagatttgctacctgttggaatgcatcggatcttgatgttggtgagaccctctggtcttgccatcagtgccactggagaagacctcttcctaaatgtgaaacctagactggatatggtggagccttccagagctgcggatattggagggctctgggccaccatccgaggctctagtttggaaggtgttagcctgatattatttggatcttactcgtgtgccatcaatgtcgctacaagcaattcaagcagaattcagtgcaaagttccacccagggggaaagatggacgcattgtgaatgtgactgtgatcagaggggactattctgcagttcttcccagagcatttacatatgtctcttccttaaatccagttattgtgactctgagcagaaacataagcaatatagcaggcggtgagaccctggtcattggagtggcgaggctgatgaactatacggatttggatgtggaagtccacgtccaggatgccttggctccggttcacacacagtcggcttggggcctggaggtggcactgcccccactgccagctggtctccacagaatttccgtctctatcaatggggtcagcattcactcacaaggggttgatctccacatccagtacctcacagaagttttcagcatcgagccttgctgtgggtccctgctgggagggaccatcctcagcatctcaggaataggcttcagcagggacccagctttggtttgggtacttgtgggcaatcggtcctgtgacattgtgaacttaacggaggcgagcatctggtgtgaaaccctgccagccccccagatacccgatgcgggcgctcccactgttccagctgccgtggaggtctgggctggcaacaggttcttcgcccgtggtccttcaccaagcttggtggggaaaggcttcaccttcatgtatgaagcggcagcaacaccagtagtcactgccatgcaaggagaaatcacaaatagcagcctgagcctgcatgtgggaggaagtaacctctccaactcagtcatccttctggggaacctgaactgtgatgttgagacacagtccttccagggcaacgtgagcctgtctggatgctccatccctcttcacagtctggaggctggcatctatcctctccaagtacgtcagaagcagatgggatttgctaatatgtctgtggtgctccagcaatttgcagtgatgcctcggataatggccatcttcccatcgcagggttcggcatgtggtgggaccatacttactgtgagggggttgcttcttaactctagaaggaggtcagttcgggttgacctctcgggtccttttacttgtgtgattttgagtttgggagaccacaccattctctgccaggttagcctggagggtgaccccttgcctggagcttccttctccctgaacgtcacagtcctggtcaatgggctaaccagcgagtgtcaggggaattgcactcttttcataagggaagaggcaagtcctgtcatggatgccttgtccacaaacaccagtgggtctctgaccactgtgctgattaggggtcagaggttagccaccacagctgatgagccgatggtatttgtggatgatcaacttccttgcaatgtaactttttttaatgcaagccacgttgtgtgccagacaagagacttggccccaggaccccactacctgtcagttttttatacaagaaatgggtatgcttgttctggtaatgtttccagacacttctacattatgccccaagtgtttcattattttcctaagaatttcagcttacatggtggaagcctcttgaccatagagggcacaggcctgagaggacagaacaccacgtcagtctatattgaccagcagacctgcctgacggtgaacatcggtgctgagctcatccggtgcattgttcccacagggaatggctctgttgccctggaaatagaggtagatggactttggtatcacataggagtcattggttataacaaggcctttaccccagaattgatctctatttctcagagcgatgacatcttaacctttgcagtggcccagatctcaggagctgcaaacattgacatttttataggaatgtcaccctgtgtgggtgtctctggtaaccacaccgttcttcagtgcgtggtcccttcccttccggccggggagtaccacgtcagaggctatgactgcatcagagggtgggcctcatctgccctggtgttcacctcaagagttattattacagcagtgacggagaacttcggctgcctgggtggaaggctggtgcatgtgtttggagcgggattttctccagggaatgtctcagctgctgtgtgtggtgctccctgccgagtcctggctaatgctacagtgtctgccttcagctgcttggttctgcccctggatgtgtccttggccttcctgtgtggcctgaagcgtgaggaggacagctgtgaggctgccagacacacctatgtgcagtgtgatttgacagttgccatggcgacagagcaactgcttgaatcgtggccttacctctacatttgcgaggaaagttcccaatgcctctttgtgccagatcattgggcagagtcaatgtttccatcattctcgggcctctttatcagccctaaattggaaagagatgaagttctcatctataatagctcctgtaacattaccatggaaactgaggcagagatggagtgtgagacgcccaatcagccaattaccgtcaagattactgagatacggaaacgctggggccagaacactcagggcaacttttctttacagttctgccggagatggtccaggactcacagctggtttcctgaaaggctgccacaagatggcgacaacgtcacagtggagaatggccaattgcttctgctggacactaacacaagcatcctcaacttactgcacattaaagggggcaagctgattttcatggccccaggacccatcgagctcagggcacacgccatccttgtttctgatggtggagagctccggattggatccgaagacaagcccttccaaggcagagctcagatcacactctacgggagttcctactcaactcccttctttccctatggagtcaagttcctggctgtgaggaatggaactctttctctgcacggttcactaccagaagtaattgtcacctgtcttagagcaactgcccatgccctagacacagtgctggctttagaagatgctgtggactggaaccctggggatgaagttgtcatcatcagtggaacaggtgttaaaggtgccaaaccgatggaagagattgtcactgtggaaactgtgcaggatacagacctctatcttaagtcacctttgagatattctcacaactttacagagaattgggtggctggagagcaccatattttaaaggccactgtggctctgctcagcaggagtattaccatacaaggaaatctcactaatgagagggagaagctgcttgtttcatgccaggaggccaatgctccagaaggtaatctgcagcactgtttgtattccatgagtgagaagatgctaggatccagggatatgggagccagagtgatcgttcagtccttcccagaagagcccagccaggtccagttgaagggagtgcagtttcaagtcttggggcaagccttccataagcatctgagctcactcactctggtgggagctatgagagagtctttcatacagggctgcacagtgaggaactccttcagtagaggcctcagcatgtgcgggaccttgggcctgaaggtggacagtaatgtattctacaatattttaggtcatgcgctgctagttgggacatgcacggagatgagatatatctcctgggaggcaattcatggaaggaaagatgactggtcaggacatggaaatataataagaaacaacgtgatcatccaggtttctggtgccgagggactctccaatcctgaaatgttgacaccatctggcatctatatctgcagtcccaccaatgttatagaggggaacagagtgtgtggtgctggctatggctactttttccatctcatgaccaaccaaacatcacaagctccgcttctttccttcactcagaacattgcacattcttgtaccaggtatggtctctttgtataccctaaatttcagccaccttgggataatgtcactggcaccactctgttccagagcttcacagtttgggaaagtgcaggtggtgcccagatttttagaagtagcaatcttcgcctgaaaaacttcaaagtttattcatgcagagattttggaattgacgtcttggaaagtgatgcaaatacttcagttactgacagcttattacttggtcattttgcccacaagggaagtctgtgtatgtcatctgggattaaaactcctaaaagatgggaactgatggtgtctaacacaacctttgttaattttgatctcatcaactgtgtggccattagaacctgttcagactgttcccaaggacaaggtggatttactgtgaagaccagccagttgaagtttacaaactcttcaaacttagtggcatttccatttcctcatgcagcaattttggaagacttggatgggtctctgtctgggaaaaacagaagtcacattcttgcttctatggaaaccctttcagcttcttgtttggtcaattcaagctttggtcgggttgtccatggcagtgcctgtggaggaggtgttctttttcatcgtatgtctattggtttagcgaatactcctgaagtttcttatgatttaaccatgactgacagcagaaataaaacaaccactgtcaattatgtacgtgatacattgtctaaccctcgtggctggatggctctgctcttggaccaagagacctactcattgcaatctgagaacctttggatcaacagatctctgcagtactcagcaacctttgacaactttgctcctggtaattacctactgctggtgcacacagatttgccgccttaccctgacatcctcctaagatgtgggagtcgagtgggtctgtcttttccatttcttccatcaccaggtcagaaccaaggctgtgactggttcttcaatagccagctgaggcaactcacctatctggtttcaggtgaaggccaagttcaagtcattctccgggtgaaggaaggtatgcccccaactatttcagcttctacctctgcccctgaatcagctttaaaatggtccctccctgaaacatggcaaggtgttgaagaaggctggggaggatacaacaataccattccaggccctggggatgacgttctcattttacccaacagaactgtccttgtggatacagatcttccattcttcaaagggctgtatgtgatggggaccttagacttccctgtggacagaagcaatgttctgagtgtggcatgcatggtcattgcaggcggggagctgaaagttggtactttagaaaatcccttagaaaaggaacaaaagcttctgattctccttagagcctcagagggagtcttttgtgaccgtatgaatggaattcatattgacccaggaacaattggggtttatgggaaagttcatctttacagtgcttatcctaagaactcctggacacatcttggagctgatattgcctcaggaaatgagagaattatagtagaagatgcagtggattggcgcccccatgacaaaatagtccttagctcctcttcttatgagcctcatgaagcagaggtcctcactgtgaaagaagtcaagggccaccatgtgaggatctatgaacggctcaaacaccggcatattggaagtgtacatgtcacggaggatggccgacacattcgtttggctgctgaggttggactgttgacccgaaatatacaaattcagcctgacgtatcatgtagggggagactgtttgtggggtccttcaggaagtccagccgagaagaattttcaggtgtccttcaacttcttaatgtggaaattcagaacttcgggtcaccattgtactcatctgttgaattcagtaatgtgtcagcaggatcctggatcatatcatctactctgcaccagagctgtggcgggggcattcatgcagctgccagtcatggagtacttttaaatgacaatattgtgtttggcacagctggccatggcatagatttagagggtcaggcctatactgtcactaataaccttgtggttctgatgacacagccagcgtggtccaccatttgggtggcgggaatcaaagtgaaccaggtaaaggacatcaacctccatggcaacgttgtggcaggatcagagagacttggctttcacatccgaggccacaagtgctcctcttgtgaactgctttggtctgacaatgtggcgcattcaagtcttcatggccttcatctctataaggaaagtggacttgacaactgtaccagaatctctggcttcttggctttcaagaactttgactatggtgccatgttacatgtagagaacagcgtggagatagagaacattactctggtagacaatactattggtcttttggcagtagtgtatgtattttctgctccacaaaattccgtcaaaaaagtgcagattgtgcttaggaattcagtcattgtggccaccagctcttcttttgactgcattcaggacaaagtgaagccgcactcagccaacttgacatcaacagatagagctccctccaatccaagaggaggtcgaattggtattctgtggcctgtattcacctcagaaccaaatcagtggcctcaggagccatggcacaaagtgaggaatgatcattcaatttcaggaatcatgaaacttcaagatgttaccttttctagttttgtgaagagttgctatagcgatgacctggatgtctgcattctaccaaatgcagagaacagtggaattatgcacccaataacagcagagaggaccaggatgctaaagataaaagataaaaacaagttctactttccttcattacaacccaggaaagatttaggaaaagtagtctgtcctgaattagactgtgcaagtccaagaaaatatctcttcaaggatctggatgggagagccctgggtctgcctccaccagtttctgtatttcctaaaacagaggcagaatggactgcatccttcttcaacgcagtaaccactgagcaggctttgaagatttcagaatagaggaggagcctgcaggaagctgaactttgaaagattaatgaggcagcaggaagcagggtgaagaatgggttggagcatggaccaaatggaaagacttgttaagacactgtttcaattgttcaaattgagaagaaattgattgaggactgggaggagattgatggcagccagaatggagaggatggtacagatcaaagaaatacaaaagagaggaaatagagtttgcttactcctgactttggggactgtggagagggtgtcaacagtgacaccattgtccgtagtcaggatatctttgggaatggaagttccagtagcagatatgggggagtaggaaagaagaggatggttgcttaagctttgcctttagtgagtttggggtacccactatatgagagaggagcaattcagatattaaattggtggtgttgaaatctttggaattagagctttggagataaattgcagctagatataaattatctggaataaagtgataggtgaaataatatggtagagaagccttattttatttctctcttctttaccaattatattgagatattattattattggcatattaatatattattattggtatattaataatataataatataggtatattatcaataatatactaatactaatataccaataatagtgggttattgttaataatattggtaaagaaagaacataaatgtaagtttattaccaagaatattggtgtggtaaagataacccatttatgctggaggttgcaattttttgaattgcaaaatcagaccttggccatgaccttaagcagtaggatataaataactcccatgtgcccagtgttccattattggaacagtgtgccattcttgtgcactgatggaggaaatagttacagatacagtgtgatttgaggaattggttcccccagagccttattgaccctcaaatacttcccttacccatgttatcatttcctttctatcctaaaattgctacctttgctgccagatcttttccttcataaagtcaatgtgacatttactcatttattaactcatttcttcaacagatacttattgggcatttactgtatgccaagtattgtaataaatgctgtatgtacaaaatgaca

SEQ ID NO: 75 - DNA, 3313 bp, Homo sapiens
  human coiled-coil domain containing 147 (CCDC147) cDNA
gcgccgagcgcgggtttccgctcggggcgggcgatagagacagcgcgtcgcgcctttagcttctttcccagactccggcccagctcctgcgatctccacagcagcctctgaggccgcccccagagagcatcaggatggctgaggaaaagggtggaaagcaagtcctggaagaatctgcatttgaagaaatggaaagagattttcagggagttctccatgaactttctggagacaaaagtttggaaaaatttcggattgaatatgagaggcttcatgctgtcatgaaaaagtcttatgacaatgaaaagcgtctgatggccaaatgcagagagctaaatgcagagattgtagtgaattctgcgaaggtcgccactgcccttaagctctctcaggatgatcagaccaccattgcatccctaaagaaggaaattgaaaaggcctggaagatggtggactcagcctatgacaaagagcagaaggccaaggagacgattcttgctctgaaagaggaaatagtgaacctgaccaaactagtggagcaggggtctggactgtcaatggaccagcatagcaacatccgagatttactgaggttcaaagaagaagtgacaaaggagagagaccagctcttatcagaagtggtaaaattacgagaatccctagctcagaccactgaacagcagcaggaaacagagcgatcaaaagaggaggctgaacatgccatcagtcagttccaacaagaaatccagcaacgtcagaacgaagcttcccgggagttccggaagaaggaaaaactagagaaagagctcaagcagattcaggcagacatggacagcaggcagacagaaataaaagccctgcagcagtatgtgcagaagagcaaggaggagcttcagaagctggagcagcagctgaaggagcagaagatattgaatgagagagctgcaaaggaactcgagcaatttcagatgagaaatgctaaacttcagcaagagaatgaacagcacagtttggtctgtgagcagctatcccaggaaaaccaacagaaggcgttggagctcaaagccaaagaggaagaagtccatcaaatgcgccttgacatcgggaagctcaacaaaatcagagaacaaattcataagaaattgcaccacaccgaagatcaaaaggcagaagtcgaacagcacaaagaaaccctaaaaaatcagattgtgggattagagagagaggtagaggcttcaaagaaacaagcagaacttgacagaaaggcaatggacgagcttctaagagaaagggacatactaaataagaacatgcttaaggcggtcaatgcgacccagaagcagacagacttggtaaagctccatgaacaagccaagaggaacctggagggagaaatccagaactacaaggatgaggctcagaagcagagaaagatcatctttcatctggaaaaggagcgtgaccggtacatcaaccaagccagtgaccttacgcaaaaggtccttatgaacatggaagacataaaagttcgtgaaacacagatttttgactacaggaaaaaaatagctgaatcagagattaaattaaaacagcaacagaacctatatgaagctgtgagatcagacagaaatctgtatagcaaaaatctggttgaggctcaggatgaaataacagatatgaagagaaagttaaagattatgatccatcaggtagatgagctgaaagaagacatctctgccaaagagtccgcacttgtgaagctgcacctggaacagcagcgaatagaaaaggaaaaggaaacattgaaggctgagctgcagaagctgagacaacaagccctggagacaaaacactttattgaaaagcaagaagctgaagagagaaaactcctgcgaataattgctgaggctgacggggagaggttgagacagaagaaggaattagaccaggtcatcagtgagagagatatcctggggtctcagcttgttcggcgcaatgatgagttagctttgctctatgagaagatcaagatccaacagtctgtgctgaataaaggggagagccagtacaaccagaggttggaggacatgagaatcctcagacttgagatcaagaagcttcgccgggaaaaggggattcttgccaggagtatggctaatgttgaagaactcagacaggagttttttcacatgcaaagagaattgttgaaggagaggacacgctgccgagccctggaggaggagctggagaatcccctgaatgtgcacagatggaggaagctcgaggccagcgaccccaatgcatatgagctgatacagaaaattcacaccctgcagaagcgtctcatcagcaagactgaagaggtggttgaaaaagagctgctcctccaggaaaaggagaaactctacatggaactaaagcacgtcttggcccgccagcctggacctgaggctgcggaacagctgaagctgtaccgacgcacgctgcatgacaagaagcagcagctgaaagttttgtcttcagaattgaatatgtatgaagtacagagcaaagaatataaatatgaggtagagaaacttaccaatgagctccagaatttaaagaagaaatacctcgctcagaaacgtaaagaacaacttcaaaaaaacaaggacacagcacccatggataacaccttcttaatggtcaaaccaaatggtcctggttttactgggggcggatttcctctcaggtcaaccaaaatgacgttctaacctgaagctgctggctgtttccagttgaacaactcatgaaatctgctctgggacattttgggggaatctcaaagtccttggatcatagaactgagtgctgagaatccaggatggaaagaaatgcagaactatcatagtcacatacatataagagggatggtgttttgtctggttcacgttgatattaacagatcataattctctctgttcagttaggctgacctattgcatgaagcaaatcttttgttgctaccccattgattgaaatgtactagaccttaatttctttattacagacattggtgtacttgaaggttttatatttaaaagtatttttgaaatgcaatgtgtcccctctcaccttattaacaataatctattttaattattcctcattaacaagtcattgcatgagatgagaaagaaggacaaactcttaagaatttaaaaagtgttttgagaatgatttctatatggaatttcttttcaggcccggaatgggaaaatctattccaaagagacacactaataaatacttcattataaaaaataaaaaagaa

SEQ ID NO: 76 - protein, 478 aa, Homo sapiens
  human forkhead box D3 (FOXD3)
MTLSGGGSASDMSGQTVLTAEDVDIDVVGEGDDGLEEKDSDAGCDSPAGPPELRLDEADEVPPAAPHHGQPQPPHQQPLTLPKEAAGAGAGPGGDVGAPEADGCKGGVGGEEGGASGGGPGAGSGSAGGLAPSKPKNSLVKPPYSYIALITMAILQSPQKKLTLSGICEFISNRFPYYREKFPAWQNSIRHNLSLNDCFVKIPREPGNPGKGNYWTLDPQSEDMFDNGSFLRRRKRFKRHQQEHLREQTALMMQSFGAYSLAAAAGAAGPYGRPYGLHPAAAAGAYSHPAAAAAAAAAAALQYPYALPPVAPVLPPAVPLLPSGELGRKAAAFGSQLGPGLQLQLNSLGAAAAAAGTAGAAGTTASLIKSEPSARPSFSIENIIGGGPAAPGGSAVGAGVAGGTGGSGGGSTAQSFLRPPGTVQSAALMATHQPLSLSRTTATIAPILSVPLSGQFLQPAASAAAAAAAAAQAKWPAQ

SEQ ID NO: 77 - protein, 479 aa, Homo sapiens
  human phosphatidylinositol 4-kinase type 2 alpha (PI4K2A)
MDETSPLVSPERAQPPDYTFPSGSGAHFPQVPGGAVRVAAAAGSGPSPPGSPGHDRERQPLLDRARGAAAQGQTQTVAAQAQALAAQAAAAAHAAQAHRERNEFPEDPEFEAVVRQAELAIERCIFPERIYQGSSGSYFVKDPQGRIIAVFKPKNEEPYGHLNPKWTKWLQKLCCPCCFGRDCLVLNQGYLSEAGASLVDQKLELNIVPRTKVVYLASETFNYSAIDRVKSRGKRLALEKVPKVGQRFNRIGLPPKVGSFQLFVEGYKDADYWLRRFEAEPLPENTNRQLLLQFERLVVLDYIIRNTDRGNDNWLIKYDCPMDSSSSRDTDWVVVKEPVIKVAAIDNGLAFPLKHPDSWRAYPFYWAWLPQAKVPFSQEIKDLILPKISDPNFVKDLEEDLYELFKKDPGFDRGQFHKQIAVMRGQILNLTQALKDNKSPLHLVQMPPVIVETARSHQRSSSESYTQSFQSRKPFFSWW

SEQ ID NO: 78 - protein, 121 aa, Homo sapiens
  human microtubule-associated protein 1 light chain 3 alpha (MAP1LC3A), isoform a
MPSDRPFKQRRSFADRCKEVQQIRDQHPSKIPVIIERYKGEKQLPVLDKTKFLVPDHVNMSELVKIIRRRLQLNPTQAFFLLVNQHSMVSVSTPIADIYEQEKDEDGFLYMVYASQETFGF

SEQ ID NO: 79 - protein, 125 aa, Homo sapiens
  human microtubule-associated protein 1 light chain 3 alpha (MAP1LC3A), isoform b
MKMRFFSSPCGKAAVDPADRCKEVQQIRDQHPSKIPVIIERYKGEKQLPVLDKTKFLVPDHVNMSELVKIIRRRLQLNPTQAFFLLVNQHSMVSVSTPIADIYEQEKDEDGFLYMVYASQETFGF

SEQ ID NO: 80 - protein, 701 aa, Homo sapiens [sequence omitted]

SEQ ID NO: 81 - protein, 714 aa, Homo sapiens
  human acyl-CoA synthetase short-chain family member 2 (ACSS2), isoform 2
MGLPEERVRSGSGSRGQEEAGAGGRARSWSPPPEVSRSAHVPSLQRYRELHRRSVEEPREFWGDIAKEFYWKTPCPGPFLRYNFDVTKGKIFIEWMKGATTNICYNVLDRNVHEKKLGDKVAFYWEGNEPGETTQITYHQLLVQVCQFSNVLRKQGIQKGDRVAIYMPMIPELVVAMLACARIGALHSIVFAGFSSESLCERILDSSCSLLITTDAFYRGEKLVNLKELADEALQKCQEKGFPVRCCIVVKHLGRAELGMGDSTSQSPPIKRSCPDVQGKLKEKSKRVQPQISWNQGIDLWWHELMQEAGDECEPEWCDAEDPLFILYTSGSTGKPKGVVHTVGGYMLYVATTFKYVFDFHAEDVFWCTADIGWITGHSYVTYGPLANGATSVLFEGIPTYPDVNRLWSIVDKYKVTKFYTAPTAIRLLMKFGDEPVTKHSRASLQVLGTVGEPINPEAWLWYHRVVGAQRCPIVDTFWQTETGGHMLTPLPGATPMKPGSATFPFFGVAPAILNESGEELEGEAEGYLVFKQPWPGIMRTVYGNHERFETTYFKKFPGYYVTGDGCQRDQDGYYWITGRIDDMLNVSGHLLSTAEVESALVEHEAVAEAAVVGHPHPVKGECLYCFVTLCDGHTFSPKLTEELKKQIREKIGPIATPDYIQNAPGLPKTRSGKIMRRVLRKIAQNDHDLGDMSTVADPSVISHLFSHRCLTIQ

SEQ ID NO: 82 - protein, 132 aa, Homo sapiens
  human agouti signaling protein (ASIP) precursor, nonagouti homolog (mouse)
MDVTRLLLATLLVFLCFFTANSHLPPEEKLRDDRSLRSNSSVNLLDVPSVSIVALNKKSKQIGRKAAEKKRSSKKEASMKKVVRPRTPLSAPCVATRNSCKPPAPACCDPCASCQCRFFRSACSCRVLSLNC

SEQ ID NO: 83 - protein, 312 aa, Homo sapiens
  human olfactory receptor, family 2, subfamily L, member 8 (OR2L8)
MENYNQTSTDFILLGLFPPSRIDLFFFILIVFIFLMALIGNLSMILLIFLDTHLHTPMYFLLSQLSLIDLNYISTIVPKMASDFLHGNKSISFTGCGIQSFFFLALGGAEALLLASMAYDRYIAICFPLHYLIRMSKRVCVLMITGSWIIGSINACAHTVYVLHIPYCRSRAINHFFCDVPAMVTLACMDTWVYEGTVFLSATIFLVFPFIGISCSYGQVLFAVYHMKSAEGRKKAYLTCSTHLTVVTFYYAPFVYTYLRPRSLRSPTEDKVLAVFYTILTPMLNPIIYSLRNKEVMGALTRVSQRICSVKM

SEQ ID NO: 84 - protein, 372 aa, Homo sapiens [sequence omitted]

SEQ ID NO: 85 - protein, 372 aa, Homo sapiens [sequence omitted]

SEQ ID NO: 86 - protein, 1544 aa, Homo sapiens
  human lysine (K)-specific demethylase 5B (KDM5B), jumonji, AT rich interactive domain 1B, jumonji/ARID domain-containing protein 1B (JARID1B)
MEAATTLHPGPRPALPLGGPGPLGEFLPPPECPVFEPSWEEFADPFAFIHKIRPIAEQTGICKVRPPPDWQPPFACDVDKLHFTPRIQRLNELEAQTRVKLNFLDQIAKYWELQGSTLKIPHVERKILDLFQLNKLVAEEGGFAVVCKDRKWTKIATKMGFAPGKAVGSHIRGHYERILNPYNLFLSGDSLRCLQKPNLTTDTKDKEYKPHDIPQRQSVQPSETCPPARRAKRMRAEAMNIKIEPEETTEARTHNLRRRMGCPTPKCENEKEMKSSIKQEPIERKDYIVENEKEKPKSRSKKATNAVDLYVCLLCGSGNDEDRLLLCDGCDDSYHTFCLIPPLHDVPKGDWRCPKCLAQECSKPQEAFGFEQAARDYTLRTFGEMADAFKSDYFNMPVHMVPTELVEKEFWRLVSTIEEDVTVEYGADIASKEFGSGFPVRDGKIKLSPEEEEYLDSGWNLNNMPVMEQSVLAHITADICGMKLPWLYVGMCFSSFCWHIEDHWSYSINYLHWGEPKTWYGVPGYAAEQLENVMKKLAPELFVSQPDLLHQLVTIMNPNTLMTHEVPVYRTNQCAGEFVITFPRAYHSGFNQGFNFAEAVNFCTVDWLPLGRQCVEHYRLLHRYCVFSHDEMICKMASKADVLDVVVASTVQKDMAIMIEDEKALRETVRKLGVIDSERMDFELLPDDERQCVKCKTTCFMSAISCSCKPGLLVCLHHVKELCSCPPYKYKLRYRYTLDDLYPMMNALKLRAESYNEWALNVNEALEAKINKKKSLVSFKALIEESEMKKFPDNDLLRHLRLVTQDAEKCASVAQQLLNGKRQTRYRSGGGKSQNQLTVNELRQFVTQLYALPCVLSQTPLLKDLLNRVEDFQQHSQKLLSEETPSAAELQDLLDVSFEFDVELPQLAEMRIRLEQARWLEEVQQACLDPSSLTLDDMRRLIDLGVGLAPYSAVEKAMARLQELLTVSEHWDDKAKSLLKARPRHSLNSLATAVKEIEEIPAYLPNGAALKDSVQRARDWLQDVEGLQAGGRVPVLDTLIELVTRGRSIPVHLNSLPRLETLVAEVQAWKECAVNTFLTENSPYSLLEVLCPRCDIGLLGLKRKQRKLKEPLPNGKKKSTKLESLSDLERALTESKETASAMATLGEARLREMEALQSLRLANEGKLLSPLQDVDIKICLCQKAPAAPMIQCELCRDAFHTSCVAVPSISQGLRIWLCPHCRRSEKPPLEKILPLLASLQRIRVRLPEGDALRYMIERTVNWQHRAQQLLSSGNLKFVQDRVGSGLLYSRWQASAGQVSDTNKVSQPPGTTSFSLPDDWDNRTSYLHSPFSTGRSCIPLHGVSPEVNELLMEAQLLQVSLPEIQELYQTLLAKPSPAQQTDRSSPVRPSSEKNDCCRGKRDGINSLERKLKRRLEREGLSSERWERVKKMRTPKKKKIKLSHPKDMNNFKLERERSYELVRSAETHSLPSDTSYSEQEDSEDEDAICPAVSCLQPEGDEVDWVQCDGSCNQWFHQVCVGVSPEMAEKEDYICVRCTVKDAPSRK

SEQ ID NO: 87 - protein, 316 aa, Homo sapiens
  human cyclin-dependent kinase inhibitor 1C (p57, Kip2) (CDKN1C), isoform a
MSDASLRSTSTMERLVARGTFPVLVRTSACRSLFGPVDHEELSRELQARLAELNAEDQNRWDYDFQQDMPLRGPGRLQWTEVDSDSVPAFYRETVQVGRCRLLLAPRPVAVAVAVSPPLEPAAESLDGLEEAPEQLPSVPVPAPASTPPPVPVLAPAPAPAPAPVAAPVAAPVAVAVLAPAPAPAPAPAPAPAPVAAPAPAPAPAPAPAPAPAPAPDAAPQESAEQGANQGQRGQEPLADQLHSGISGRPAAGTAAASANGAAIKKLSGPLISDFFAKRKRSAPEKSSGDVPAPCPSPSAAPGVGSVEQTPRKRLR

SEQ ID NO: 88 - protein, 305 aa, Homo sapiens
  human cyclin-dependent kinase inhibitor 1C (p57, Kip2) (CDKN1C), isoform b
MERLVARGTFPVLVRTSACRSLFGPVDHEELSRELQARLAELNAEDQNRWDYDFQQDMPLRGPGRLQWTEVDSDSVPAFYRETVQVGRCRLLLAPRPVAVAVAVSPPLEPAAESLDGLEEAPEQLPSVPVPAPASTPPPVPVLAPAPAPAPAPVAAPVAAPVAVAVLAPAPAPAPAPAPAPAPVAAPAPAPAPAPAPAPAPAPAPDAAPQESAEQGANQGQRGQEPLADQLHSGISGRPAAGTAAASANGAAIKKLSGPLISDFFAKRKRSAPEKSSGDVPAPCPSPSAAPGVGSVEQTPRKRLR

SEQ ID NO: 89 - protein, 305 aa, Homo sapiens; identical to SEQ ID NO: 88
  human cyclin-dependent kinase inhibitor 1C (p57, Kip2) (CDKN1C), isoform b

SEQ ID NO: 90 - protein, 474 aa, Homo sapiens
  human preferentially expressed antigen in melanoma (PRAME) family member 7 (PRAMEF7)
MSIRAPPRLLELARQRLLRDQALAISTMEELPRELFPTLFMEAFSRRRCETLKTMVQAWPFTRLPLGSLMKSPHLESLKSVLEGVDVLLTQEVRPRQSKLQVLDLRNVDENFCDIFSGATASFPEALSQKQTADNCPGTGRQQPFMVFIDLCLKNRTLDECLTHLLEWGKQRKGLLHVCCKELQVFGMPIHSIIEVLNMVELDCIQEVEVCCPWELSTLVKFAPYLGQMRNLRKLVLFNIRASACIPPDNKGQFIARFTSQFLKLDYFQNLSMHSVSFLEGHLDQLLRCLQASLEMVVMTDCLLSESDLKHLSWCPSIRQLKELDLRGVTLTHFSPEPLTGLLEQVVATLQTLDLEDCGIMDSQLSAILPVLSRCSQLSTFSFCGNLISMAALENLLRHTVGLSKLSLELYPAPLESYDTQGALCWGRFAELGAELMKTPRDLRQPKIIVFCTVPCPRCGIRASYDLEPSHCLC

SEQ ID NO: 91 - protein, 75 aa, Homo sapiens
  human guanine nucleotide binding protein (G protein), gamma 3 (GNG3) precursor
MKGETPVNSTMSIGQARKMVEQLKIEASLCRIKVSKAAADLMTYCDAHACEDPLITPVPTSENPFREKKFFCALL

SEQ ID NO: 92 - protein, 1279 aa, Homo sapiens
  human Rho guanine nucleotide exchange factor (GEF) 10-like (ARHGEF10L), isoform 1
MASSNPPPQPAIGDQLVPGVPGPSSEAEDDPGEAFEFDDSDDEEDTSAALGVPSLAPERDTDPPLIHLDSIPVTDPDPAAAPPGTGVPAWVSNGDAADAAFSGARHSSWKRKSSRRIDRFTFPALEEDVIYDDVPCESPDAHQPGAERNLLYEDAHRAGAPRQAEDLGWSSSEFESYSEDSGEEAKPEVEVEPAKHRVSFQPKLSPDLTRLKERYARTKRDILALRVGGRDMQELKHKYDCKMTQLMKAAKSGTKDGLEKTRMAVMRKVSFLHRKDVLGDSEEEDMGLLEVSVSDIKPPAPELGPMPEGLSPQQVVRRHILGSIVQSEGSYVESLKRILQDYRNPLMEMEPKALSARKCQVVFFRVKEILHCHSMFQIALSSRVAEWDSTEKIGDLFVASFSKSMVLDVYSDYVNNFTSAMSIIKKACLTKPAFLEFLKRRQVCSPDRVTLYGLMVKPIQRFPQFILLLQDMLKNTPRGHPDRLSLQLALTELETLAEKLNEQKRLADQVAEIQQLTKSVSDRSSLNKLLTSGQRQLLLCETLTETVYGDRGQLIKSKERRVFLLNDMLVCANINFKPANHRGQLEISSLVPLGPKYVVKWNTALPQVQVVEVGQDGGTYDKDNVLIQHSGAKKASASGQAQNKVYLGPPRLFQELQDLQKDLAVVEQITLLISTLHGTYQNLNMTVAQDWCLALQRLMRVKEEEIHSANKCRLRLLLPGKPDKSGRPISFMVVFITPNPLSKISWVNRLHLAKIGLREENQPGWLCPDEDKKSKAPFWCPILACCIPAFSSRALSLQLGALVHSPVNCPLLGFSAVSTSLPQGYLWVGGGQEGAGGQVEIFSLNRPSPRTVKSFPLAAPVLCMEYIPELEEEAESRDESPTVADPSATVHPTICLGLQDGSILLYSSVDTGTQCLVSCRSPGLQPVLCLRHSPFHLLAGLQDGTLAAYPRTSGGVLWDLESPPVCLTVGPGPVRTLLSLEDAVWASCGPRVTVLEATTLQPQQSFEAHQDEAVSVTHMVKAGSGVWMAFSSGTSIRLFHTETLEHLQEINIATRTTFLLPGQKHLCVTSLLICQGLLWVGTDQGVIVLLPVPRLEGIPKITGKGMVSLNGHCGPVAFLAVATSILAPDILRSDQEEAEGPRAEEDKPDGQAHEPMPDSHVGRELTRKKGILLQYRLRSTAHLPGPLLSMREPAPADGAALEHSEEDGSIYEMADDPDIWVRSRPCARDAHRKEICSVAIISGGQGYRNFGSALGSSGRQAPCGETDSTLLIWQVPLML

SEQ ID NO: 93 - protein, 1240 aa, Homo sapiens
  human Rho guanine nucleotide exchange factor (GEF) 10-like (ARHGEF10L), isoform 2
MASSNPPPQPAIGDQLVPGVPGPSSEAEDDPGEAFEFDDSDDEEDTSAALGVPSLAPERDTDPPLIHLDSIPVTDPDPAAAPPGTGVPAWVSNGDAADAAFSGARHSSWKRKSSRRIDRFTFPALEEDVIYDDVPCESPDAHQPGAERNLLYEDAHRAGAPRQAEDLGWSSSEFESYSEDSGEEAKPEVEVEPAKHRVSFQPKMTQLMKAAKSGTKDGLEKTRMAVMRKVSFLHRKDVLGDSEEEDMGLLEVSVSDIKPPAPELGPMPEGLSPQQVVRRHILGSIVQSEGSYVESLKRILQDYRNPLMEMEPKALSARKCQVVFFRVKEILHCHSMFQIALSSRVAEWDSTEKIGDLFVASFSKSMVLDVYSDYVNNFTSAMSIIKKACLTKPAFLEFLKRRQVCSPDRVTLYGLMVKPIQRFPQFILLLQDMLKNTPRGHPDRLSLQLALTELETLAEKLNEQKRLADQVAEIQQLTKSVSDRSSLNKLLTSGQRQLLLCETLTETVYGDRGQLIKSKERRVFLLNDMLVCANINFKPANHRGQLEISSLVPLGPKYVVKWNTALPQVQVVEVGQDGGTYDKDNVLIQHSGAKKASASGQAQNKVYLGPPRLFQELQDLQKDLAVVEQITLLISTLHGTYQNLNMTVAQDWCLALQRLMRVKEEEIHSANKCRLRLLLPGKPDKSGRPISFMVVFITPNPLSKISWVNRLHLAKIGLREENQPGWLCPDEDKKSKAPFWCPILACCIPAFSSRALSLQLGALVHSPVNCPLLGFSAVSTSLPQGYLWVGGGQEGAGGQVEIFSLNRPSPRTVKSFPLAAPVLCMEYIPELEEEAESRDESPTVADPSATVHPTICLGLQDGSILLYSSVDTGTQCLVSCRSPGLQPVLCLRHSPFHLLAGLQDGTLAAYPRTSGGVLWDLESPPVCLTVGPGPVRTLLSLEDAVWASCGPRVTVLEATTLQPQQSFEAHQDEAVSVTHMVKAGSGVWMAFSSGTSIRLFHTETLEHLQEINIATRTTFLLPGQKHLCVTSLLICQGLLWVGTDQGVIVLLPVPRLEGIPKITGKGMVSLNGHCGPVAFLAVATSILAPDILRSDQEEAEGPRAEEDKPDGQAHEPMPDSHVGRELTRKKGILLQYRLRSTAHLPGPLLSMREPAPADGAALEHSEEDGSIYEMADDPDIWVRSRPCARDAHRKEICSVAIISGGQGYRNFGSALGSSGRQAPCGETDSTLLIWQVPLML

SEQ ID NO: 94 - protein, 147 aa, Homo sapiens
  human microtubule-associated protein 1 light chain 3 gamma (MAP1LC3C)
MPPPQKIPSVRPFKQRKSLAIRQEEVAGIRAKFPNKIPVVVERYPRETFLPPLDKTKFLVPQELTMTQFLSIIRSRMVLRATEAFYLLVNNKSLVSMSATMAEIYRDYKDEDGFVYMTYASQETFGCLESAAPRDGSSLEDRPCNPL

SEQ ID NO: 95 - protein, 254 aa, Homo sapiens
  human chromosome 20 open reading frame 71 (C20orf71), isoform 1, short palate, lung and nasal epithelium carcinoma-associated protein 3 (SPLUNC3)
MMCPLWRLLIFLGLLALPLAPHKQPWPGLAQAHRDNKSTLARIIAQGLIKHNAESRIQNIHFGDRLNASAQVAPGLVGWLISGRKHQQQQESSINITNIQLDCGGIQISFHKEWFSANISLEFDLELRPSFDNNIVKMCAHMSIVVEFWLEKDEFGRRDLVIGKCDAEPSSVHVAILTEAIPPKMNQFLYNLKENLQKVLPHMVESQVCPLIGEILGQLDVKLLKSLIEQEAAHEPTHHETSQPSACQAGESPS

SEQ ID NO: 96 - protein, 218 aa, Homo sapiens
  human chromosome 20 open reading frame 71 (C20orf71), isoform 2, short palate, lung and nasal epithelium carcinoma-associated protein 3 (SPLUNC3)
MMCPLWRLLIFLGLLALPLAPHKQPWPGLAQAHRDNKSTLARIIAQGLIKHNAESRIQNIHFGDRLNASAQVAPGLVGWLISGRKHQQQQESRSFDNNIVKMCAHMSIVVEFWLEKDEFGRRDLVIGKCDAEPSSVHVAILTEAIPPKMNQFLYNLKENLQKVLPHMVESQVCPLIGEILGQLDVKLLKSLIEQEAAHEPTHHETSQPSACQAGESPS

SEQ ID NO: 97 - protein, 484 aa, Homo sapiens
  human chromosome 20 open reading frame 114 (C20orf114), long palate, lung and nasal epithelium carcinoma-associated protein 1 (LPLUNC1) precursor
MAGPWTFTLLCGLLAATLIQATLSPTAVLILGPKVIKEKLTQELKDHNATSILQQLPLLSAMREKPAGGIPVLGSLVNTVLKHIIWLKVITANILQLQVKPSANDQELLVKIPLDMVAGFNTPLVKTIVEFHMTTEAQATIRMDTSASGPTRLVLSDCATSHGSLRIQLLHKLSFLVNALAKQVMNLLVPSLPNLVKNQLCPVIEASFNGMYADLLQLVKVPISLSIDRLEFDLLYPAIKGDTIQLYLGAKLLDSQGKVTKWFNNSAASLTMPTLDNIPFSLIVSQDVVKAAVAAVLSPEEFMVLLDSVLPESAHRLKSSIGLINEKAADKLGSTQIVKILTQDTPEFFIDQGHAKVAQLIVLEVFPSSEALRPLFTLGIEASSEAQFYTKGDQLILNLNNISSDRIQLMNSGIGWFQPDVLKNIITEIIHSILLPNQNGKLRSGVPVSLVKALGFEAAESSLTKDALVLTPASLWKPSSPVSQ

SEQ ID NO: 98 - protein, 490 aa, Homo sapiens
  human sushi domain containing 4 (SUSD4), isoform a
MYHGMNPSNGDGFLEQQQQQQQPQSPQRLLAVILWFQLALCFGPAQLTGGFDDLQVCADPGIPENGFRTPSGGVFFEGSVARFHCQDGFKLKGATKRLCLKHFNGTLGWIPSDNSICVQEDCRIPQIEDAEIHNKTYRHGEKLIITCHEGFKIRYPDLHNMVSLCRDDGTWNNLPICQGCLRPLASSNGYVNISELQTSFPVGTVISYRCFPGFKLDGSAYLECLQNLIWSSSPPRCLALEVCPLPPMVSHGDFVCHPRPCERYNHGTVVEFYCDPGYSLTSDYKYITCQYGEWFPSYQVYCIKSEQTWPSTHETLLTTWKIVAFTATSVLLVLLLVILARMFQTKFKAHFPPRGPPRSSSSDPDFVVVDGVPVMLPSYDEAVSGGLSALGPGYMASVGQGCPLPVDDQSPPAYPGSGDTDTGPGESETCDSVSGSSELLQSLYSPPRCQESTHPASDNPDIIASTAEEVASTSPGIDIADEIPLMEEDP

SEQ ID NO: 99 - protein, 290 aa, Homo sapiens
  human sushi domain containing 4 (SUSD4), isoform b
MYHGMNPSNGDGFLEQQQQQQQPQSPQRLLAVILWFQLALCFGPAQLTGGFDDLQVCADPGIPENGFRTPSGGVFFEGSVARFHCQDGFKLKGATKRLCLKHFNGTLGWIPSDNSICVQEDCRIPQIEDAEIHNKTYRHGEKLIITCHEGFKIRYPDLHNMVSLCRDDGTWNNLPICQGCLRPLASSNGYVNISELQTSFPVGTVISYRCFPGFKLDGSAYLECLQNLIWSSSPPRCLALEGGRPEHLFPVLYFPHIRLAAAVLYFCPVLKSSPTPAPTCSSTSTTTSLF

SEQ ID NO: 100 - protein, 778 aa, Homo sapiens
  human zinc finger protein 33B (ZNF33B)
MNKVDQKFQGSVSFKDVTVGFTQEEWQHLDPSQRALYRDVMLENYSNLVSVGYCAHKPEVIFRLEQGEEPWRLEEEFPSQSFPEVWTADHLKERSQENQSKHLWEVVFINNEMLTKEQGNVIGIPFNMDVSSFPSRKMFCQYDSRGMSFNTVSELVISKINYLGKKSDEFNACGKLLLNIKHDETHTREKNEVLKNRNTLSHRENTLQHEKIQTLDHNFEYSICQETLLEKAVFNTRKRENAEENNCDYNEFGRTFCDSSSLLFHQIPPSKDSHYEFSDCEKFLCVKSTLSKHDGVPVKHYDCGESGNNFRRKLCLSQLQKGDKGEKHFECNECGKAFWEKSHLTRHQRVHTGEKHFQCNQCGKTFWEKSNLTKHQRSHTGEKPFECNECGKAFSHKSALTLHQRTHTGEKPYQCNACGKTFYQKSDLTKHQRTHTGQKPYECYECGKSFCMNSHLTVHQRTHTGEKPFECLECGKSFCQKSHLTQHQRTHIGDKPYECNACGKTFYHKSVLTRHQIIHTGLKPYECYECGKTFCLKSDLTIHQRTHTGEKPFACPECGKFFSHKSTLSQHYRTHTGEKPYECHECGKIFYNKSYLTKHNRTHTGEKPYECNECGKTFCQKSQLTQHQRIHIGEKPYECNECGKAFCHKSALIVHQRTHTQEKPYKCNECGKSFCVKSGLILHERKHTGEKPYECNECGKSFSHKSSLTVHHRAHTGEKSCQCNECGKIFYRKSDLAKHQRSHTGEKPYECNTCRKTFSQKSNLIVHQRTHIGEKPYE

SEQ ID NO: 101 - protein, 305 aa, Homo sapiens
  human olfactory receptor, family 10, subfamily W, member 1 (OR10W1)
MEFVFLAYPSCPELHILSFLGVSLVYGLIITGNILIVVSIHTETCLCTSMYYFLGSLSGIEICYTAVVVPHILANTLQSEKTITLLGCATQMAFFIALGSADCFLLAAMAYDRYVAICHPLQYPLLMTLTLCVHLVVASVISGLFLSLQLVAFIFSLPFCQAQGIEHFFCDVPPVMHVVCAQSHIHEQSVLVAAILAIAVPFFLITTSYTFIVAALLKIHSAAGRHRAFSTCSSHLTVVLLQYGCCAFMYLCPSSSYNPKQDQFISLVYTLGTPLLNPLIYALRNSEMKGAVGRVLTRNCLSQNS

SEQ ID NO: 102 - protein, 416 aa, Homo sapiens
  human RCSD domain containing 1 (RCSD1)
MEERPAETNANVDNSASPSVAQLAGRFREQAAAAKETPASKPTRRKPPCSLPLFPPKVDLGQNGEEKSPPNASHPPKFKVKSSPLIEKLQANLTFDPAALLPGASPKSPGLKAMVSPFHSPPSTPSSPGVRSRPSEAEEVPVSFDQPPEGSHLPCYNKVRTRGSIKRRPPSRRFRRSQSDCGELGDFRAVESSQQNGAKEEDGDEVLPSKSKAPGSPLSSEGAAGEGVRTLGPAEKPPLRRSPSRTEKQEEDRATEEAKNGEKARRSSEEVDGQHPAQEEVPESPQTSGPEAENRCGSPREEKPAGEEAEMEKATEVKGERVQNEEVGPEHDSQETKKLEEGAAVKETPHSPPGGVKGGDVPKQEKGKEKQQEGAVLEPGCSPQTGPAQLETSSEVQSEPAVPKPEDDTPVQDTKM

SEQ ID NO: 103 - protein, 1427 aa, Homo sapiens
  human coiled-coil domain containing 144A (CCDC144A)
MASWGGEKRGGAEGSPKPAVYATRKTPSVGSQGDQWYLGYPGDQWSSGFPYSWWKNSVGSESKHGEGALDQPQHDVRLEDLGELHRAARSGDVPGVEHILAPGDTGVDKRDRKKSIQQLVPEYKEKQTPESLPQNNNPDWHPTNLTLSDETCQRSKNLKVDDKCPSVSPSMPENQSATKELGQMNLTEREKMDTGVVLLSGNDTLHDLCQSQLPENKESKEAEQDSELTSEEEQERLKGCENKQPQKTSQEPEMAKDCDREDIPIYPVLPHVQKSEEMWIEQGKLEWKNQLKLVINELKQRFGEIYEKYKIPACPEEEPLLDNSTRGTDVKDIPFNLTNNIPGCEEEDASEISVSVVFETFPEQKEPSLKNIIHPYYHPYSGSQEHVCQSSSKFHLHENKLDCDNDNKPGIGHIFSTDKNFHNDASTKKARNPEVVMVEMKEDQEFDLQMTKNMNQNSDSGSTNNYKSLKPKLENLSSLPPDSDRTSEVYLHEELQQDMQKFKNEVNTLEEEFLALKKEDVQLHKDVEEEMEKHRSNSTELSGTLTDGTTVGNDDDGLNQQIPRKENGEHDRPADKTSNEKNEVKNQIYPEADFADSMEPSEIASEDCELSHSVYENFMLLIEQLRMEYKDSASLPRIQDTFCLCEHLLKLKNNHCDQLTVKLKQMENMVSVLQNELSETKKTKLQLELQKIEWEKELYDLRLALKQENEEKRNADMLYNKDSEQLRIKEEECGKVVETKQQLKWNLRRLVKELRTVRNNLDLVVQERNDAQKQLSEEQDARILQDQILTSKQKELEMARKKMNSEISHRHQKEKDLFHEDCMLQEEIALLRLEIDTIKNQNKQKEKKYFEDIEAVKEKNDNLQKIIKLNEETLTETILQYSGQLNNLTAENKILNSELENGKQNQERLEIEMESYRCRLAAAVRDCDQSQTARDLKLDFQRTRQEWVRLHDKMKVDMSGLQAKNEILSEKLSNAESKINSLQIQLHNTRDALGRESLILERVQRDLSQTQCQKKETEQMYQIEQSKLKKYIAKQESVEERLSQLQSENMLLRQQLDDAHKKANSQEKTSSTIQDQFHSAAKNLQAESEKQILSLQEKNKELMDEYNHLKERMDQCEKEKAGRKIDLTEAQETVPSRCLHLDAENEVLQLQQTLFSMKAIQKQCETLQKNKKQLKQEVVNLKSYMERNMLERGKAEWHKLLIEERARKEIEEKLNEAILTLQKQAAVSHEQLVQLREDNTTSIKTQMELTIKDLESEISRIKTSQADFNKTELERYKELYLEEVKVRESLSNELSRTNEMIAEVSTQLTVEKEQTRSRSLFTAYATRPVLESPCVGNLNDSEGLNRKHIPRKKRSALKDMESYLLKMQQKLQNDLTAEVAGSSQTGLHRIPQCSSFSSSSLHLLLCSICQPFFLILQLLLNMNLDPI

SEQ ID NO: 104 - protein, 1379 aa, Homo sapiens
  human attractin-like 1 (ATRNL1) precursor
METGGRARTGTPQPAAPGVWRARPAGGGGGGASSWLLDGNSWLLCYGFLYLALYAQVSQSKPCERTGSCFSGRCVNSTCLCDPGWVGDQCQHCQGRFKLTEPSGYLTDGPINYKYKTKCTWLIEGYPNAVLRLRFNHFATECSWDHMYVYDGDSIYAPLIAVLSGLIVPEIRGNETVPEVVTTSGYALLHFFSDAAYNLTGFNIFYSINSCPNNCSGHGKCTTSVSVPSQVYCECDKYWKGEACDIPYCKANCGSPDHGYCDLTGEKLCVCNDSWQGPDCSLNVPSTESYWILPNVKPFSPSVGRASHKAVLHGKFMWVIGGYTFNYSSFQMVLNYNLESSIWNVGTPSRGPLQRYGHSLALYQENIFMYGGRIETNDGNVTDELWVFNIHSQSWSTKTPTVLGHGQQYAVEGHSAHIMELDSRDVVMIIIFGYSAIYGYTSSIQEYHISSNTWLVPETKGAIVQGGYGHTSVYDEITKSIYVHGGYKALPGNKYGLVDDLYKYEVNTKTWTILKESGFARYLHSAVLINGAMLIFGGNTHNDTSLSNGAKCFSADFLAYDIACDEWKILPKPNLHRDVNRFGHSAVVINGSMYIFGGFSSVLLNDILVYKPPNCKAFRDEELCKNAGPGIKCVWNKNHCESWESGNTNNILRAKCPPKTAASDDRCYRYADCASCTANTNGCQWCDDKKCISANSNCSMSVKNYTKCHVRNEQICNKLTSCKSCSLNLNCQWDQRQQECQALPAHLCGEGWSHIGDACLRVNSSRENYDNAKLYCYNLSGNLASLTTSKEVEFVLDEIQKYTQQKVSPWVGLRKINISYWGWEDMSPFTNTTLQWLPGEPNDSGFCAYLERAAVAGLKANPCTSMANGLVCEKPVVSPNQNARPCKKPCSLRTSCSNCTSNGMECMWCSSTKRCVDSNAYIISFPYGQCLEWQTATCSPQNCSGLRTCGQCLEQPGCGWCNDPSNTGRGHCIEGSSRGPMKLIGMHHSEMVLDTNLCPKEKNYEWSFIQCPACQCNGHSTCINNNVCEQCKNLTTGKQCQDCMPGYYGDPTNGGQCTACTCSGHANICHLHTGKCFCTTKGIKGDQCQLCDSENRYVGNPLRGTCYYSLLIDYQFTFSLLQEDDRHHTAINFIANPEQSNKNLDISINASNNFNLNITWSVGSTAGTISGEETSIVSKNNIKEYRDSFSYEKFNFRSNPNITFYVYVSNFSWPIKIQIAFSQHNTIMDLVQFFVTFFSCFLSLLLVAAVVWKIKQTCWASRRREQLLRERQQMASRPFASVDVALEVGAEQTEFLRGPLEGAPKPIAIEPCAGNRAAVLTVFLCLPRGSSGAPPPGQSGLAIASALIDISQQKASDSKDKTSGVRNRKHLSTRQGTCV

SEQ ID NO: 105 - protein, 318 aa, Homo sapiens
  human olfactory receptor, family 51, subfamily E, member 1 (OR51E1)
MMVDPNGNESSATYFILIGLPGLEEAQFWLAFPLCSLYLIAVLGNLTIIYIVRTEHSLHEPMYIFLCMLSGIDILISTSSMPKMLAIFWFNSTTIQFDACLLQMFAIHSLSGMESTVLLAMAFDRYVAICHPLRHATVLTLPRVTKIGVAAVVRGAALMAPLPVFIKQLPFCRSNILSHSYCLHQDVMKLACDDIRVNVVYGLIVIISAIGLDSLLISFSYLLILKTVLGLTREAQAKAFGTCVSHVCAVFIFYVPFIGLSMVHRFSKRRDSPLPVILANIYLLVPPVLNPIVYGVKTKEIRQRILRLFHVATHASEP

SEQ ID NO: 106 - protein, 325 aa, Homo sapiens
  human olfactory receptor, family 6, subfamily Y, member 1 (OR6Y1)
MTTIILEVDNHTVTTRFILLGFPTRPAFQLLFFSIFLATYLLTLLENLLIILAIHSDGQLHKPMYFFLSHLSFLEMWYVTVISPKMLVDFLSHDKSISFNGCMTQLYFFVTFVCTEYILLAIMAFDRYVAICNPLRYPVIMTNQLCGTLAGGCWFCGLMTAMIKMVFIAQLHYCGMPQINHYFCDISPLLNVSCEDASQAEMVDFFLALMVIAIPLCVVVASYAAILATILRIPSAQGRQKAFSTCASHLTVVILFYSMTLFTYARPKLMYAYNSNKVVSVLYTVIVPLLNPIIYCLRNHEVKAALRKTIHCRGSGPQGNGAFSS

SEQ ID NO: 107 - protein, 89 aa, Homo sapiens
  human islet amyloid polypeptide (IAPP) precursor
MGILKLQVFLIVLSVALNHLKATPIESHQVEKRKCNTATCATQRLANFLVHSSNNFGAILSSTNVGSNTYGKRNAVEVLKREPLNYLPL

SEQ ID NO: 108 - protein, 261 aa, Homo sapiens
  human leucine rich repeat containing 18 (LRRC18)
MVKGEKGPKGKKITLKVARNCIKITFDGKKRLDLSKMGITTFPKCILRLSDMDELDLSRNLIRKIPDSISKFQNLRWLDLHSNYIDKLPESIGQMTSLLYLNVSNNRLTSNGLPVELKQLKNIRAVNLGLNHLDSVPTTLGALKELHEVGLHDNLLNNIPVSISKLPKLKKLNIKRNPFPKPGESEIFIDSIRRLENLYVVEEKDLCAACLRKCQNARDNLNRIKNMATTTPRKTIFPNLISPNSMAKDSWEDWRIRLTSS

SEQ ID NO: 109 - skipped

SEQ ID NO: 110 - protein, 370 aa, Homo sapiens
  human lysophosphatidylglycerol acyltransferase 1 (LPGAT1)
MAITLEEAPWLGWLLVKALMRFAFMVVNNLVAIPSYICYVIILQPLRVLDSKRFWYIEGIMYKWLLGMVASWGWYAGYTVMEWGEDIKAVSKDEAVMLVNHQATGDVCTLMMCLQDKGLVVAQMMWLMDHIFKYTNFGIVSLVHGDFFIRQGRSYRDQQLLLLKKHLENNYRSRDRKWIVLFPEGGFLRKRRETSQAFAKKNNLPFLTNVTLPRSGATKIILNALVAQQKNGSPAGGDAKELDSKSKGLQWIIDTTIAYPKAEPIDIQTWILGYRKPTVTHVHYRIFPIKDVPLETDDLTTWLYQRFVEKEDLLSHFYETGAFPPSKGHKEAVSREMTLSNLWIFLIQSFAFLSGYMWYNIIQYFYHCLF

SEQ ID NO: 111 - protein, 433 aa, Homo sapiens
  human ring finger protein 26 (RNF26)
MEAVYLVVNGLGLVLDVLTLVLDLNFLLVSSLLASLAWLLAFVYNLPHTVLTSLLHLGRGVLLSLLALIEAVVRFTCGGLQALCTLLYSCCSGLESLKLLGHLASHGALRSREILHRGVLNVVSSGHALLRQACDICAIAMSLVAYVINSLVNICLIGTQNLFSLVLALWDAVTGPLWRMTDVVAAFLAHISSSAVAMAILLWTPCQLALELLASAARLLASFVLVNLTGLVLLACVLAVTVTVLHPDFTLRLATQALSQLHARPSYHRLREDVMRLSRLALGSEAWRRVWSRSLQLASWPNRGGAPGAPQGDPMRVFSVRTRRQDTLPEAGRRSEAEEEEARTIRVTPVRGRERLNEEEPPGGQDPWKLLKEQEERKKCVICQDQSKTVLLLPCRHLCLCQACTEILMRHPVYHRNCPLCRRGILQTLNVYL

SEQ ID NO: 112 - protein, 433 aa, Homo sapiens
  human gap junction protein, alpha 8, 50kDa (GJA8), connexin 50
MGDWSFLGNILEEVNEHSTVIGRVWLTVLFIFRILILGTAAEFVWGDEQSDFVCNTQQPGCENVCYDEAFPISHIRLWVLQIIFVSTPSLMYVGHAVHYVRMEEKRKSREAEELGQQAGTNGGPDQGSVKKSSGSKGTKKFRLEGTLLRTYICHIIFKTLFEVGFIVGHYFLYGFRILPLYRCSRWPCPNVVDCFVSRPTEKTIFILFMLSVASVSLFLNVMELGHLGLKGIRSALKRPVEQPLGEIPEKSLHSIAVSSIQKAKGYQLLEEEKIVSHYFPLTEVGMVETSPLPAKPFNQFEEKISTGPLGDLSRGYQETLPSYAQVGAQEVEGEGPPAEEGAEPEVGEKKEEAERLTTEEQEKVAVPEGEKVETPGVDKEGEKEEPQSEKVSKQGLPAEKTPSLCPELTTDDARPLSRLSKASSRARSDDLTV

SEQ ID NO: 113 - protein, 579 aa, Homo sapiens
  human glypican 2 (GPC2) precursor
MSALRPLLLLLLPLCPGPGPGPGSEAKVTRSCAETRQVLGARGYSLNLIPPALISGEHLRVCPQEYTCCSSETEQRLIRETEATFRGLVEDSGSFLVHTLAARHRKFDEFFLEMLSVAQHSLTQLFSHSYGRLYAQHALIFNGLFSRLRDFYGESGEGLDDTLADFWAQLLERVFPLLHPQYSFPPDYLLCLSRLASSTDGSLQPFGDSPRRLRLQITRTLVAARAFVQGLETGRNVVSEALKVPVSEGCSQALMRLIGCPLCRGVPSLMPCQGFCLNVVRGCLSSRGLEPDWGNYLDGLLILADKLQGPFSFELTAESIGVKISEGLMYLQENSAKVSAQVFQECGPPDPVPARNRRAPPPREEAGRLWSMVTEEERPTTAAGTNLHRLVWELRERLARMRGFWARLSLTVCGDSRMAADASLEAAPCWTGAGRGRYLPPVVGGSPAEQVNNPELKVDASGPDVPTRRRRLQLRAATARMKTAALGHDLDGQDADEDASGSGGGQQYADDWMAGAVAPPARPPRPPYPPRRDGSGGKGGGGSARYNQGRSRSGGASIGFHTQTILILSLSALALLGPR

SEQ ID NO: 114 - protein, 485 aa, Homo sapiens
  human angiotensinogen  (AGT) (serpin peptidase inhibitor, clade A, member 8 (serpin A8, SERPINA8))
MRKRAPQSEMAPAGVSLRATILCLLAWAGLAAGDRVYIHPFHLVIHNESTCEQLAKANAGKPKDPTFIPAPIQAKTSPVDEKALQDQLVLVAAKLDTEDKLRAAMVGMLANFLGFRIYGMHSELWGVVHGATVLSPTAVFGTLASLYLGALDHTADRLQAILGVPWKDKNCTSRLDAHKVLSALQAVQGLLVAQGRADSQAQLLLSTVVGVFTAPGLHLKQPFVQGLALYTPVVLPRSLDFTELDVAAEKIDRFMQAVTGWKTGCSLMGASVDSTLAFNTYVHFQGKMKGFSLLAEPQEFWVDNSTSVSVPMLSGMGTFQHWSDIQDNFSVTQVPFTESACLLLIQPHYASDLDKVEGLTFQQNSLNWMKKLSPRTIHLTMPQLVLQGSYDLQDLLAQAELPAILHTELNLQKLSNDRIRVGEVLNSIFFELEADEREPTESTQQLNKPEVLEVTLNRPFLFAVYDQSATALHFLGRVANPLSTA

SEQ ID NO: 115 - protein, 863 aa, Homo sapiens
  human dynamin 3 (DNM3), isoform a
MGNREMEELIPLVNRLQDAFSALGQSCLLELPQIAVVGGQSAGKSSVLENFVGRDFLPRGSGIVTRRPLVLQLVTSKAEYAEFLHCKGKKFTDFDEVRLEIEAETDRVTGMNKGISSIPINLRVYSPHVLNLTLIDLPGITKVPVGDQPPDIEYQIREMIMQFITRENCLILAVTPANTDLANSDALKLAKEVDPQGLRTIGVITKLDLMDEGTDARDVLENKLLPLRRGYVGVVNRSQKDIDGKKDIKAAMLAERKFFLSHPAYRHIADRMGTPHLQKVLNQQLTNHIRDTLPNFRNKLQGQLLSIEHEVEAYKNFKPEDPTRKTKALLQMVQQFAVDFEKRIEGSGDQVDTLELSGGAKINRIFHERFPFEIVKMEFNEKELRREISYAIKNIHGIRTGLFTPDMAFEAIVKKQIVKLKGPSLKSVDLVIQELINTVKKCTKKLANFPRLCEETERIVANHIREREGKTKDQVLLLIDIQVSYINTNHEDFIGFANAQQRSSQVHKKTTVGNQVIRKGWLTISNIGIMKGGSKGYWFVLTAESLSWYKDDEEKEKKYMLPLDNLKVRDVEKSFMSSKHIFALFNTEQRNVYKDYRFLELACDSQEDVDSWKASLLRAGVYPDKSVGNNKAENDENGQAENFSMDPQLERQVETIRNLVDSYMSIINKCIRDLIPKTIMHLMINNVKDFINSELLAQLYSSEDQNTLMEESAEQAQRRDEMLRMYQALKEALGIIGDISTATVSTPAPPPVDDSWIQHSRRSPPPSPTTQRRPTLSAPLARPTSGRGPAPAIPSPGPHSGAPPVPFRPGPLPPFPSSSDSFGAPPQVPSRPTRAPPSVPSRRPPPSPTRPTIIRPLESSLLD

SEQ ID NO: 116 - protein, 859 aa, Homo sapiens
  human dynamin 3 (DNM3), isoform b
MGNREMEELIPLVNRLQDAFSALGQSCLLELPQIAVVGGQSAGKSSVLENFVGRDFLPRGSGIVTRRPLVLQLVTSKAEYAEFLHCKGKKFTDFDEVRLEIEAETDRVTGMNKGISSIPINLRVYSPHVLNLTLIDLPGITKVPVGDQPPDIEYQIREMIMQFITRENCLILAVTPANTDLANSDALKLAKEVDPQGLRTIGVITKLDLMDEGTDARDVLENKLLPLRRGYVGVVNRSQKDIDGKKDIKAAMLAERKFFLSHPAYRHIADRMGTPHLQKVLNQQLTNHIRDTLPNFRNKLQGQLLSIEHEVEAYKNFKPEDPTRKTKALLQMVQQFAVDFEKRIEGSGDQVDTLELSGGAKINRIFHERFPFEIVKMEFNEKELRREISYAIKNIHGIRTGLFTPDMAFEAIVKKQIVKLKGPSLKSVDLVIQELINTVKKCTKKLANFPRLCEETERIVANHIREREGKTKDQVLLLIDIQVSYINTNHEDFIGFANAQQRSSQVHKKTTVGNQVIRKGWLTISNIGIMKGGSKGYWFVLTAESLSWYKDDEEKEKKYMLPLDNLKVRDVEKSFMSSKHIFALFNTEQRNVYKDYRFLELACDSQEDVDSWKASLLRAGVYPDKSVAENDENGQAENFSMDPQLERQVETIRNLVDSYMSIINKCIRDLIPKTIMHLMINNVKDFINSELLAQLYSSEDQNTLMEESAEQAQRRDEMLRMYQALKEALGIIGDISTATVSTPAPPPVDDSWIQHSRRSPPPSPTTQRRPTLSAPLARPTSGRGPAPAIPSPGPHSGAPPVPFRPGPLPPFPSSSDSFGAPPQVPSRPTRAPPSVPSRRPPPSPTRPTIIRPLESSLLD

SEQ ID NO: 117 - protein, 280 aa, Homo sapiens
  human ribosomal RNA processing 7 homolog A (S. cerevisiae) (RRP7A)
MVARRRKCAARDPEDRIPSPLGYAAIPIKFSEKQQASHYLYVRAHGVRQGTKSTWPQKRTLFVLNVPPYCTEESLSRLLSTCGLVQSVELQEKPDLAESPKESRSKFFHPKPVPGFQVAYVVFQKPSGVSAALALKGPLLVSTESHPVKSGIHKWISDYADSVPDPEALRVEVDTFMEAYDQKIAEEEAKAKEEEGVPDEEGWVKVTRRGRRPVLPRTEAASLRVLERERRKRSRKELLNFYAWQHRESKMEHLAQLRKKFEEDKQRIELLRAQRKFRPY

SEQ ID NO: 118 - protein, 776 aa, Homo sapiens
  human ankyrin repeat domain 5 (ANKRD5)
MALADKRLENLQIYKVLQCVRNKDKKQIEKLTKLGYPELINYTEPINGLSALHLASVSNDIDMVSFLLDLGAHPDVQDRMGCTPTMRAAELGHELSMEILAKAKADMTIVDNEGKGVLFYCILPTKRHYRCALIALEHGADVNNSTYEGKPIFLRACEDAHDVKDVCLTFLEKGANPNAINSSTGRTALMEASREGVVEIVRGILERGGEVNAFDNDRHHAAHFAAKGGFFDILKLLFAYNGDVGLISINGNTPLHYAAMGGFADCCKYIAQRGCDLKWKNLDHKTPRAVAKEGGFKAASKEIRRAERIANKLARPGAKNPNPLWALRLHDWSVEREAFLREAFAVLDRGDGSISKNDFVMVLEERQDYASSEQLAAIAHLHEKTRGGGVNINEFFKGTRYLNKSFVLGSYGPKKKEKGMGKKGKKGKFVLPLPICVIPEYAFPRRQDGGPPYYMIETYKNVTDSSRFNRDHPPEHPIQDDSVWYIDDSEKVFSNINIITKAGDLASLKKAFESGIPVDMKDNYYKTPLMTACASGNIDVVKFLLEKGANVNATDNFLWTPLHFACHAGQQDIVELLVESGALIDAASINNSTPLNRAIESCRLDTVKYLLDIGAKFQLENRKGHSAMDVAKAYADYRIIDLIKEKLDNLPKPAENQKLKGKTPPILKTEGPEIKKEEELLSSIYGVPTTSEGKKVQKGNVVHLNSLITSGYTKKVDITFIPRRIWSPEATTAELIRKRELRRERFTHEVDFDDFMMPFQKNITEKARALEAALKT

SEQ ID NO: 119 - protein, 776 aa, Homo sapiens; identical to SEQ ID NO: 118
  human ankyrin repeat domain protein 5 (ANKRD5)

SEQ ID NO: 120 - protein, 319 aa, Homo sapiens
  human glycoprotein A33 (transmembrane) (GPA33) precursor
MVGKMWPVLWTLCAVRVTVDAISVETPQDVLRASQGKSVTLPCTYHTSTSSREGLIQWDKLLLTHTERVVIWPFSNKNYIHGELYKNRVSISNNAEQSDASITIDQLTMADNGTYECSVSLMSDLEGNTKSRVRLLVLVPPSKPECGIEGETIIGNNIQLTCQSKEGSPTPQYSWKRYNILNQEQPLAQPASGQPVSLKNISTDTSGYYICTSSNEEGTQFCNITVAVRSPSMNVALYVGIAVGVVAALIIIGIIIYCCCCRGKDDNTEDKEDARPNREAYEEPPEQLRELSREREEEDDYRQEEQRSTGRESPDHLDQ

SEQ ID NO: 121 - protein, 902 aa, Homo sapiens
  human RUN and SH3 domain containing 1 (RUSC1), isoform a
MLSPQRALLCNLNHIHLQHVSLGLHLSRRPELQEGPLSTPPPPGDTGGKESRGPCSGTLVDANSNSPAVPCRCCQEHGPGLENRQDPSQEEEGAASPSDPGCSSSLSSCSDLSPDESPVSVYLRDLPGDEDAHPQPSIIPLEQGSPLASAGPGTCSPDSFCCSPDSCSGASSSPDPGLDSNCNALTTCQDVPSPGLEEEDERAEQDLPTSELLEADDGKIDAGKTEPSWKINPIWKIDTEKTKAEWKTTENNNTGWKNNGNVNSSWKSEPEKFDSGWKTNTRITDSGSKTDAGKIDGGWRSDVSEEPVPHRTITSFHELAQKRKRGPGLPLVPQAKKDRSDWLIVFSPDTELPPSGSPGGSSAPPREVTTFKELRSRSRAPAPPVPPRDPPVGWALVPPRPPPPPVPPRRKKNRPGLQPIAEGQSEEGRAVSPAAGEEAPAAKEPGAQAGLEVRSSWSFAGVPGAQRLWMAEAQSGTGQLQEQKKGLLIAVSVSVDKIISHFGAARNLVQKAQLGDSRLSPDVGHLVLTTLCPALHALVADGLKPFRKDLITGQRRSSPWSVVEASVKPGSSTRSLGTLYSQVSRLAPLSSSRSRFHAFILGLLNTKQLELWFSSLQEDAGLLSLLYLPTGFFSLARGGCPSLSTELLLLLQPLSVLTFHLDLLFEHHHHLPLGPPQAPAPPGPPPALQQTMQAMLHFGGRLAQSLRGTSKEAASDPSDSPNLPTPGSWWEQLTQASRVYASGGTEGFPLSRWAPGRHGTAAEEGAQERPLPTDEMAPGRGLWLGRLFGVPGGPAENENGALKSRRPSSWLPPTVSVLALVKRGAPPEMPSPQELEASAPRMVQTHRAVRALCDHTAARPDQLSFRRGEVLRVITTVDEDWLRCGRDGMEGLVPVGYTSLVL

SEQ ID NO: 122 - protein, 796 aa, Homo sapiens
  human RUN and SH3 domain containing 1 (RUSC1), isoform b
MLSPQRALLCNLNHIHLQHVSLGLHLSRRPELQEGPLSTPPPPGDTGGKESRGPCSGTLVDANSNSPAVPCRCCQEHGPGLENRQDPSQEEEGAASPSDPGCSSSLSSCSDLSPDESPVSVYLRDLPGDEDAHPQPSIIPLEQGSPLASAGPGTCSPDSFCCSPDSCSGASSSPDPGLDSNCNALTTCQDVPSPGLEEEDERAEQDLPTSELLEADDGKIDAGKTEPSWKINPIWKIDTEKTKAEWKTTENNNTGWKNNGNVNSSWKSEPEKFDSGWKTNTRITDSGSKTDAGKIDGGWRSDVSEEPVPHRTITSFHELAQKRKRGPGLPLVPQAKKDRSDWLIVFSPDTELPPSGSPGGSSAPPREVTTFKELRSRSRAPAPPVPPRDPPVGWALVPPRPPPPPVPPRRKKNRPGLQPIAEGQSEEGRAVSPAAGEEAPAAKEPGAQAGLEVRSSWSFAGVPGAQRLWMAEAQSGTGQLQEQKKGLLIAVSVSVDKIISHFGAARNLVQKAQLGDSRLSPDVGHLVLTTLCPALHALVADGLKPFRKDLITGQRRSSPWSVVEASVKPGSSTRSLGTLYSQVSRLAPLSSSRSRFHAFILGLLNTKQLELWFSSLQEDAGSWWEQLTQASRVYASGGTEGFPLSRWAPGRHGTAAEEGAQERPLPTDEMAPGRGLWLGRLFGVPGGPAENENGALKSRRPSSWLPPTVSVLALVKRGAPPEMPSPQELEASAPRMVQTHRAVRALCDHTAARPDQLSFRRGEVLRVITTVDEDWLRCGRDGMEGLVPVGYTSLVL

SEQ ID NO: 123 - protein, 492 aa, Homo sapiens
  human RUN and SH3 domain containing 1 (RUSC1), isoform c
MPPTCSPGLRRQDWAPGRCAGLHLPPRAPSSPALQALAGQAGVRSSWSFAGVPGAQRLWMAEAQSGTGQLQEQKKGLLIAVSVSVDKIISHFGAARNLVQKAQLGDSRLSPDVGHLVLTTLCPALHALVADGLKPFRKDLITGQRRSSPWSVVEASVKPGSSTRSLGTLYSQVSRLAPLSSSRSRFHAFILGLLNTKQLELWFSSLQEDAGLLSLLYLPTGFFSLARGGCPSLSTELLLLLQPLSVLTFHLDLLFEHHHHLPLGPPQAPAPPGPPPALQQTMQAMLHFGGRLAQSLRGTSKEAASDPSDSPNLPTPGSWWEQLTQASRVYASGGTEGFPLSRWAPGRHGTAAEEGAQERPLPTDEMAPGRGLWLGRLFGVPGGPAENENGALKSRRPSSWLPPTVSVLALVKRGAPPEMPSPQELEASAPRMVQTHRAVRALCDHTAARPDQLSFRRGEVLRVITTVDEDWLRCGRDGMEGLVPVGYTSLVL

SEQ ID NO: 124 - protein, 433 aa, Homo sapiens
  human RUN and SH3 domain containing 1 (RUSC1), isoform d
MAEAQSGTGQLQEQKKGLLIAVSVSVDKIISHFGAARNLVQKAQLGDSRLSPDVGHLVLTTLCPALHALVADGLKPFRKDLITGQRRSSPWSVVEASVKPGSSTRSLGTLYSQVSRLAPLSSSRSRFHAFILGLLNTKQLELWFSSLQEDAGLLSLLYLPTGFFSLARGGCPSLSTELLLLLQPLSVLTFHLDLLFEHHHHLPLGPPQAPAPPGPPPALQQTMQAMLHFGGRLAQSLRGTSKEAASDPSDSPNLPTPGSWWEQLTQASRVYASGGTEGFPLSRWAPGRHGTAAEEGAQERPLPTDEMAPGRGLWLGRLFGVPGGPAENENGALKSRRPSSWLPPTVSVLALVKRGAPPEMPSPQELEASAPRMVQTHRAVRALCDHTAARPDQLSFRRGEVLRVITTVDEDWLRCGRDGMEGLVPVGYTSLVL

SEQ ID NO: 125 - protein, 336 aa, Homo sapiens
  human cell division cycle 123 homolog (S. cerevisiae) (CDC123)
MKKEHVLHCQFSAWYPFFRGVTIKSVILPLPQNVKDYLLDDGTLVVSGRDDPPTHSQPDSDDEAEEIQWSDDENTATLTAPEFPEFATKVQEAINSLGGSVFPKLNWSAPRDAYWIAMNSSLKCKTLSDIFLLFKSSDFITRDFTQPFIHCTDDSPDPCIEYELVLRKWCELIPGAEFRCFVKENKLIGISQRDYTQYYDHISKQKEEIRRCIQDFFKKHIQYKFLDEDFVFDIYRDSRGKVWLIDFNPFGEVTDSLLFTWEELISENNLNGDFSEVDAQEQDSPAFRCTNSEVTVQPSPYLSYRLPKDFVDLSTGEDAHKLIDFLKLKRNQQEDD

SEQ ID NO: 126 - protein, 81 aa, Homo sapiens
  human chromosome 10 open reading frame 99 (C10orf99), hypothetical protein LOC387695 precursor
MRLLVLSSLLCILLLCFSIFSTEGKRRPAKAWSGRRTRLCCHRVPSPNSTNLKGHHVRLCKPCKLEPEPRLWVVPGALPQV

SEQ ID NO: 127 - protein, 457 aa, Homo sapiens
  human vasoactive intestinal peptide receptor 1 (VIPR1) precursor
MRPPSPLPARWLCVLAGALAWALGPAGGQAARLQEECDYVQMIEVQHKQCLEEAQLENETIGCSKMWDNLTCWPATPRGQVVVLACPLIFKLFSSIQGRNVSRSCTDEGWTHLEPGPYPIACGLDDKAASLDEQQTMFYGSVKTGYTIGYGLSLATLLVATAILSLFRKLHCTRNYIHMHLFISFILRAAAVFIKDLALFDSGESDQCSEGSVGCKAAMVFFQYCVMANFFWLLVEGLYLYTLLAVSFFSERKYFWGYILIGWGVPSTFTMVWTIARIHFEDYGCWDTINSSLWWIIKGPILTSILVNFILFICIIRILLQKLRPPDIRKSDSSPYSRLARSTLLLIPLFGVHYIMFAFFPDNFKPEVKMVFELVVGSFQGFVVAILYCFLNGEVQAELRRKWRRWHLQGVLGWNPKYRHPSGGSNGATCSTQVSMLTRVSPGARRSSSFQAEVSLV

SEQ ID NO: 128 - protein, 1253 aa, Homo sapiens
  human family with sequence similarity 21, member B (FAM21B), hypothetical protein LOC55747
MPRLSGKSVRVYDEEVEEPVLKAEAEKTEQEKTREQKEVDLIPKVQEAVNYGLQVLDSAFEQLDIKAGNSDSEEDDANGRVELILEPKDLYIDRPLPYLIGSKLFMEQEDVGLGELSSEEGSVGSDRGSIVDTEEEKEEEESDEDFAHHSDNEQNRHTTQMSDEEEDDDGCDLFADSEKEEEDIEDIEENTRPKRSRPTSFADELAARIKGDAVGRVDEEPTTLPSGEAKPRKTLKEKKERRTPSDDEEDNLFTPPKLTDEDFSPFGSGGGLFSGGKGLFDDEDEESDLFTEAPQDRQAGASVKEESSSSKPGKKIPAGAVSVFLGDTDVFGAASVPSMKEPQKPEQPTPRKSPYGPPPTGLFDDDDGDDDDDFFSAPHSKPSKTGKVQSTADIFGDEEGDLFKEKAVASPEATVSQTDENKARAEKKVTLSSSKNLKPSSETKTQKGLFSDEEDSEDLFSSQSASKLKGASLLPGKLPTSVSLFDDEDEEDNLFGGTAAKKQTLCLQAQREEKAKASELSKKKASALLFSSDEEDQWNIPASQTHLASDSRSKGEPRDSGTLQSQEAKAVKKTSLFEEDEEDDLFAIAKDSQKKTQRVSLLFEDDVDSRGSLFGSPPTSVPPATKKKETVSEAPPLLFSDEEEKEAQLGVKSVDKKVESAKESLKFGRTDVAESEKEGLLTRSAQETVKHSDLFSSSSPWDKGTKPRTKTVLSLFDEEEDKMEDQNIIQAPQKEVGKGRDPDAHPKSTGVFQDEELLFSHKLQKDNDPDVDLFAGTKKTKLLEPSVGSLFGDDEDDDLFSSAKSQPLVQEKKRVVKKDHSVDSFKNQKHPESIQGSKEKGIWKPETPQDSSGLAPFKTKEPSTRIGKIQANLAINPAALLPTAASQISEVKPVLPELAFPSSEHRRSHGLESVPVLPGSGEAGVSFDLPAQADTLHSANKSRVKMRGKRRPQTRAARRLAAQESSETEDMSVPRGPIAQWADGAISPNGHRPQLRAASGEDSTEEALAAAAAPWEGGPVPGVDRSPFAKSLGHSRGEADLFDSGDIFSTGTGSQSVERTKPKAKIAENPANPPVGGKAKSPMFPALGEASSDDDLFQSAKPKPAKKTNTFPLLEDEDDLFTDQKVKKNETKSNSQQDVILTTQDIFEDDIFATEAIKPSQKTREKEKTLESNLFDDNIDIFADLTVKPKEKSKKKVEAKSIFDDDMDDIFSSGIQAKTTKPKSRSAQAAPEPRFEHKVSNIFDDPLNAFGGQ

SEQ ID NO: 129 - protein, 668 aa, Homo sapiens
  human metastasis associated 1 family, member 2 (MTA2), metastasis-associated protein 2
MAANMYRVGDYVYFENSSSNPYLVRRIEELNKTANGNVEAKVVCLFRRRDISSSLNSLADSNAREFEEESKQPGVSEQQRHQLKHRELFLSRQFESLPATHIRGKCSVTLLNETDILSQYLEKEDCFFYSLVFDPVQKTLLADQGEIRVGCKYQAEIPDRLVEGESDNRNQQKMEMKVWDPDNPLTDRQIDQFLVVARAVGTFARALDCSSSIRQPSLHMSAAAASRDITLFHAMDTLQRNGYDLAKAMSTLVPQGGPVLCRDEMEEWSASEAMLFEEALEKYGKDFNDIRQDFLPWKSLASIVQFYYMWKTTDRYIQQKRLKAAEADSKLKQVYIPTYTKPNPNQIISVGSKPGMNGAGFQKGLTCESCHTTQSAQWYAWGPPNMQCRLCASCWIYWKKYGGLKTPTQLEGATRGTTEPHSRGHLSRPEAQSLSPYTTSANRAKLLAKNRQTFLLQTTKLTRLARRMCRDLLQPRRAARRPYAPINANAIKAECSIRLPKAAKTPLKIHPLVRLPLATIVKDLVAQAPLKPKTPRGTKTPINRNQLSQNRGLGGIMVKRAYETMAGAGVPFSANGRPLASGIRSSSQPAAKRQKLNPADAPNPVVFVATKDTRALRKALTHLEMRRAARRPNLPLKVKPTLIAVRPPVPLPAPSHPASTNEPIVLED

SEQ ID NO: 130 - protein, 1133 aa, Homo sapiens
  human ring finger and CCCH-type zinc finger domains 1 (RC3H1), roquin
MPVQAPQWTDFLSCPICTQTFDETIRKPISLGCGHTVCKMCLNKLHRKACPFDQTTINTDIELLPVNSALLQLVGAQVPEQQPITLCSGVEDTKHYEEAKKCVEELALYLKPLSSARGVGLNSTTQSVLSRPMQRKLVTLVHCQLVEEEGRIRAMRAARSLGERTVTELILQHQNPQQLSSNLWAAVRARGCQFLGPAMQEEALKLVLLALEDGSALSRKVLVLFVVQRLEPRFPQASKTSIGHVVQLLYRASCFKVTKRDEDSSLMQLKEEFRTYEALRREHDSQIVQIAMEAGLRIAPDQWSSLLYGDQSHKSHMQSIIDKLQTPASFAQSVQELTIALQRTGDPANLNRLRPHLELLANIDPSPDAPPPTWEQLENGLVAVRTVVHGLVDYIQNHSKKGADQQQPPQHSKYKTYMCRDMKQRGGCPRGASCTFAHSQEELEKFRKMNKRLVPRRPLSASLGQLNEVGLPSAAILPDEGAVDLPSRKPPALPNGIVSTGNTVTQLIPRGTDPSYDSSLKPGKIDHLSSSAPGSPPDLLESVPKSISALPVNPHSIPPRGPADLPPMPVTKPLQMVPRGSQLYPAQQTDVYYQDPRGAAPPFEPAPYQQGMYYTPPPQCVSRFVRPPPSAPEPAPPYLDHYPPYLQERVVNSQYGTQPQQYPPIYPSHYDGRRVYPAPSYTREEIFRESPIPIEIPPAAVPSYVPESRERYQQIESYYPVAPHPTQIRPSYLREPPYSRLPPPPQPHPSLDELHRRRKEIMAQLEERKVISPPPFAPSPTLPPTFHPEEFLDEDLKVAGKYKGNDYSQYSPWSCDTIGSYIGTKDAKPKDVVAAGSVEMMNVESKGMRDQRLDLQRRAAETSDDDLIPFGDRPTVSRFGAISRTSKTIYQGAGPMQAMAPQGAPTKSINISDYSPYGTHGGWGASPYSPHQNIPSQGHFSERERISMSEVASHGKPLPSAEREQLRLELQQLNHQISQQTQLRGLEAVSNRLVLQREANTLAGQSQPPPPPPPKWPGMISSEQLSLELHQVEREIGKRTRELSMENQCSLDMKSKLNTSKQAENGQPEPQNKVPAEDLTLTFSDVPNGSALTQENISLLSNKTSSLNLSEDPEGGGDNNDSQRSGVTPSSAP

SEQ ID NO: 131 - protein, 993 aa, Homo sapiens
  human hypothetical protein LOC23065 precursor (KIAA0090)
MAAEWASRFWLWATLLIPAAAVYEDQVGKFDWRQQYVGKVKFASLEFSPGSKKLVVATEKNVIAALNSRTGEILWRHVDKGTAEGAVDAMLLHGQDVITVSNGGRIMRSWETNIGGLNWEITLDSGSFQALGLVGLQESVRYIAVLKKTTLALHHLSSGHLKWVEHLPESDSIHYQMVYSYGSGVVWALGVVPFSHVNIVKFNVEDGEIVQQVRVSTPWLQHLSGACGVVDEAVLVCPDPSSRSLQTLALETEWELRQIPLQSLDLEFGSGFQPRVLPTQPNPVDASRAQFFLHLSPSHYALLQYHYGTLSLLKNFPQTALVSFATTGEKTVAAVMACRNEVQKSSSSEDGSMGSFSEKSSSKDSLACFNQTYTINLYLVETGRRLLDTTITFSLEQSGTRPERLYIQVFLKKDDSVGYRALVQTEDHLLLFLQQLAGKVVLWSREESLAEVVCLEMVDLPLTGAQAELEGEFGKKADGLLGMFLKRLSSQLILLQAWTSHLWKMFYDARKPRSQIKNEINIDTLARDEFNLQKMMVMVTASGKLFGIESSSGTILWKQYLPNVKPDSSFKLMVQRTTAHFPHPPQCTLLVKDKESGMSSLYVFNPIFGKWSQVAPPVLKRPILQSLLLPVMDQDYAKVLLLIDDEYKVTAFPATRNVLRQLHELAPSIFFYLVDAEQGRLCGYRLRKDLTTELSWELTIPPEVQRIVKVKGKRSSEHVHSQGRVMGDRSVLYKSLNPNLLAVVTESTDAHHERTFIGIFLIDGVTGRIIHSSVQKKAKGPVHIVHSENWVVYQYWNTKARRNEFTVLELYEGTEQYNATAFSSLDRPQLPQVLQQSYIFPSSISAMEATITERGITSRHLLIGLPSGAILSLPKALLDPRRPEIPTEQSREENLIPYSPDVQIHAERFINYNQTVSRMRGIYTAPSGLESTCLVVAYGLDIYQTRVYPSKQFDVLKDDYDYVLISSVLFGLVFATMITKRLAQVKLLNRAWR

SEQ ID NO: 132 - protein, 333 aa, Homo sapiens
  human eukaryotic translation initiation factor 2, subunit 2 beta, 38kDa, eukaryotic translation initiation factor 2 beta (EIF2S2)
MSGDEMIFDPTMSKKKKKKKKPFMLDEEGDTQTEETQPSETKEVEPEPTEDKDLEADEEDTRKKDASDDLDDLNFFNQKKKKKKTKKIFDIDEAEEGVKDLKIESDVQEPTEPEDDLDIMLGNKKKKKKNVKFPDEDEILEKDEALEDEDNKKDDGISFSNQTGPAWAGSERDYTYEELLNRVFNIMREKNPDMVAGEKRKFVMKPPQVVRVGTKKTSFVNFTDICKLLHRQPKHLLAFLLAELGTSGSIDGNNQLVIKGRFQQKQIENVLRRYIKEYVTCHTCRSPDTILQKDTRLYFLQCETCHSRCSVASIKTGFQAVTGKRAQLRAKAN

SEQ ID NO: 133 - protein, 199 aa, Homo sapiens
  human MAP6 domain containing 1 (MAP6D1)
MAWPCISRLCCLARRWNQLDRSDVAVPLTLHGYSDLDSEEPGTGGAASRRGQPPAGARDSGRDVPLTQYQRDFGLWTTPAGPKDPPPGRGPGAGGRRGKSSAQSSAPPAPGARGVYVLPIGDADAAAAVTTSYRQEFQAWTGVKPSRSTKTKPARVITTHTSGWDSSPGAGFQVPEVRKKFTPNPSAIFQASAPRILNV

SEQ ID NO: 134 - protein, 312 aa, Homo sapiens
  human olfactory receptor, family 2, subfamily M, member 7 (OR2M7)
MAWENQTFNSDFLLLGIFNHSPTHTFLFFLVLAIFSVAFMGNSIMVLLIYLDTQLHTPMYFLLSQLSLMDLMLICTTVPKMAFNYLSGSKSISMAGCATQIFFYISLLGSECFLLAVMSYDRYTAICHPLRYTNLMRPKICGLMTAFSWILGSTDGIIDAVATFSFSYCGSREIAHFCCDFPSLLILSCNDTSIFEEVIFICCIVMLVFPVAIIITSYARVILAVIHMGSGEGRRKAFTTCSSHLMVVGMYYGAGLFMCIQPTSHHSPMQDKMVSVFYTIVTPMLNPLIYSLRNKEVTRALMKILGKGKSGD

SEQ ID NO: 135 - protein, 878 aa, Homo sapiens
  human family with sequence similarity 22, member A (FAM22A), hypothetical protein LOC728118
MEVKGPSGRSFCCESEGQFKSCLKRHTPSLLLPSSWKGNSGSCLMAKALHRMSPTPNSCPLPLPLCRMSGVLCSRNLFTFKFSLFQLDSGASGEPGHSLGLTLGFSHCGNCQTAVVSAQPEGMASNGAYPALGPGVTANPGTSLSVFTALPFTTPAPGPAHGPLLVTAGAPPGGPLVLSTLPSTPLVTEQDGCGPSGAGASNVFVQMRTEVGPVKAAQAQTLVLTQAPLVWQAPGALCGGVVCPPPLLLAAAPVVPVMAAQVVGGTQACEGGWSQGLPLPPPPPPAAQLPPIVSQGNAGPWPQGAHGEGSLASSQAKAPPDDSCNPRSVYENFRLWQHYKPLARRHLPQSPDTEALSCFLIPVLRSLARRKPTMTLEEGLWRAMREWQHTSNFDRMIFYEMAEKFLEFEAEEEMQIQKSQWMKGPQCLPPPATPRLEPRGPPAPEVVKQPVYLPSKAGPKAPTACLPPPRPQRPVTKARRPPPRPHRRAETKARLPPPRPQRPAETKVPEEIPPEVVQEYVDIMEELLGPSLGATGEPEKQREEGEVKQPQEEDWTPPDPGLLSYTDKLCSQKDFVTKVEAVIHPQFLEELLSPDPQMDFLALSQELEQEEGLTLAQLVEKRLLPLKEKQHARAAPSRGTARLDSSSSKFAAGQGAERDVPVPQQGVGMETCPPQTTARDSQGRGRAHTGMARSKDSVVLLGCQDSPGLRAARPTSPPQDHRPTCPGVGTKDALDLPGGSPVRESHGLAQGSSEEEELPSLAFLLGSQHKLLPWWLPQSPVPASGLLSPEKWGPQGTHQFPSAERRGLNLAPSPANKAKKRPLFGSLSPAEKTPHPGPGLRVSGEQSLTWGLGGPSQSQKRKGDPLVSRKEKKQRCSQ

SEQ ID NO: 136 - protein, 358 aa, Homo sapiens
  human G protein-coupled receptor 87 (GPR87)
MGFNLTLAKLPNNELHGQESHNSGNRSDGPGKNTTLHNEFDTIVLPVLYLIIFVASILLNGLAVWIFFHIRNKTSFIFYLKNIVVADLIMTLTFPFRIVHDAGFGPWYFKFILCRYTSVLFYANMYTSIVFLGLISIDRYLKVVKPFGDSRMYSITFTKVLSVCVWVIMAVLSLPNIILTNGQPTEDNIHDCSKLKSPLGVKWHTAVTYVNSCLFVAVLVILIGCYIAISRYIHKSSRQFISQSSRKRKHNQSIRVVVAVFFTCFLPYHLCRIPFTFSHLDRLLDESAQKILYYCKEITLFLSACNVCLDPIIYFFMCRSFSRRLFKKSNIRTRSESIRSLQSVRRSEVRIYYDYTDV

SEQ ID NO: 137 - protein, 804 aa, Homo sapiens
  human 20S rRNA accumulation, homolog (S. cerevisiae) (TSR1)
MAAHRPGPLKQQNKAHKGGRHRGRGSAQRDGKGRLALKTLSKKVRKELSRVDQRHRASQLRKQKKEAVLAEKRQLGGKDGPPHQVLVVPLHSRISLPEAMQLLQDRDTGTVHLNELGNTQNFMLLCPRLKHRWFFTSARPGDLHVVLDMAKVADTILFLLDPLEGWDSTGDYCLSCLFAQGLPTYTLAVQGISGLPLKKQIDTRKKLSKAVEKRFPHDKLLLLDTQQEAGMLLRQLANQKQQHLAFRDRRAYLFAHAVDFVPSEENNLVGTLKISGYVRGQTLNVNRLLHIVGYGDFQMKQIDAPGDPFPLNPRGIKPQKDPDMAMEICATDAVDDMEEGLKVLMKADPGRQESLQAEVIPDPMEGEQTWPTEEELSEAKDFLKESSKVVKKVPKGTSSYQAEWILDGGSQSGGEGDEYEYDDMEHEDFMEEESQDESSEEEEEYETMTIGESVHDDLYDKKVDEEAEAKMLEKYKQERLEEMFPDEVDTPRDVAARIRFQKYRGLKSFRTSPWDPKENLPQDYARIFQFQNFTNTRKSIFKEVEEKEVEGAEVGWYVTLHVSEVPVSVVECFRQGTPLIAFSLLPHEQKMSVLNMVVRRDPGNTEPVKAKEELIFHCGFRRFRASPLFSQHTAADKHKLQRFLTADMALVATVYAPITFPPASVLLFKQKSNGMHSLIATGHLMSVDPDRMVIKRVVLSGHPFKIFTKMAVVRYMFFNREDVLWFKPVELRTKWGRRGHIKEPLGTHGHMKCSFDGKLKSQDTVLMNLYKRVFPKWTYDPYVPEPVPWLKSEISSTVPQGGME

SEQ ID NO: 138 - protein, 754 aa, Homo sapiens
  human a disintegrin and metalloproteinase (ADAM) domain 7, ADAM metallopeptidase domain 7 (ADAM7) precursor
MLPGCIFLMILLIPQVKEKFILGVEGQQLVRPKKLPLIQKRDTGHTHDDDILKTYEEELLYEIKLNRKTLVLHLLRSREFLGSNYSETFYSMKGEAFTRHPQIMDHCFYQGSIVHEYDSAASISTCNGLRGFFRINDQRYLIEPVKYSDEGEHLVFKYNLRVPYGANYSCTELNFTRKTVPGDNESEEDSKIKGIHDEKYVELFIVADDTVYRRNGHPHNKLRNRIWGMVNFVNMIYKTLNIHVTLVGIEIWTHEDKIELYSNIETTLLRFSFWQEKILKTRKDFDHVVLLSGKWLYSHVQGISYPGGMCLPYYSTSIIKDLLPDTNIIANRMAHQLGHNLGMQHDEFPCTCPSGKCVMDSDGSIPALKFSKCSQNQYHQYLKDYKPTCMLNIPFPYNFHDFQFCGNKKLDEGEECDCGPAQECTNPCCDAHTCVLKPGFTCAEGECCESCQIKKAGSICRPAKDECDFPEMCTGHSPACPKDQFRVNGFPCKNSEGYCFMGKCPTREDQCSELFDDEAIESHDICYKMNTKGNKFGYCKNKENRFLPCEEKDVRCGKIYCTGGELSSLLGEDKTYHLKDPQKNATVKCKTIFLYHDSTDIGLVASGTKCGEGMVCNNGECLNMEKVYISTNCPSQCNENPVDGHGLQCHCEEGQAPVACEETLHVTNITILVVVLVLVIVGIGVLILLVRYRKCIKLKQVQSPPTETLGVENKGYFGDEQQIRTEPILPEIHFLNKPASKDSRGIADPNQSAK

SEQ ID NO: 139 - protein, 625 aa, Homo sapiens
  human lysyl-tRNA synthetase (KARS), isoform 1
MLTQAAVRLVRGSLRKTSWAEWGHRELRLGQLAPFTAPHKDKSFSDQRSELKRRLKAEKKVAEKEAKQKELSEKQLSQATAAATNHTTDNGVGPEEESVDPNQYYKIRSQAIHQLKVNGEDPYPHKFHVDISLTDFIQKYSHLQPGDHLTDITLKVAGRIHAKRASGGKLIFYDLRGEGVKLQVMANSRNYKSEEEFIHINNKLRRGDIIGVQGNPGKTKKGELSIIPYEITLLSPCLHMLPHLHFGLKDKETRYRQRYLDLILNDFVRQKFIIRSKIITYIRSFLDELGFLEIETPMMNIIPGGAVAKPFITYHNELDMNLYMRIAPELYHKMLVVGGIDRVYEIGRQFRNEGIDLTHNPEFTTCEFYMAYADYHDLMEITEKMVSGMVKHITGSYKVTYHPDGPEGQAYDVDFTPPFRRINMVEELEKALGMKLPETNLFETEETRKILDDICVAKAVECPPPRTTARLLDKLVGEFLEVTCINPTFICDHPQIMSPLAKWHRSKEGLTERFELFVMKKEICNAYTELNDPMRQRQLFEEQAKAKAAGDDEAMFIDENFCTALEYGLPPTAGWGMGIDRVAMFLTDSNNIKEVLLFPAMKPEDKKENVATTDTLESTTVGTSV

SEQ ID NO: 140 - protein, 597 aa, Homo sapiens
  human lysyl-tRNA synthetase (KARS), isoform 2
MAAVQAAEVKVDGSEPKLSKNELKRRLKAEKKVAEKEAKQKELSEKQLSQATAAATNHTTDNGVGPEEESVDPNQYYKIRSQAIHQLKVNGEDPYPHKFHVDISLTDFIQKYSHLQPGDHLTDITLKVAGRIHAKRASGGKLIFYDLRGEGVKLQVMANSRNYKSEEEFIHINNKLRRGDIIGVQGNPGKTKKGELSIIPYEITLLSPCLHMLPHLHFGLKDKETRYRQRYLDLILNDFVRQKFIIRSKIITYIRSFLDELGFLEIETPMMNIIPGGAVAKPFITYHNELDMNLYMRIAPELYHKMLVVGGIDRVYEIGRQFRNEGIDLTHNPEFTTCEFYMAYADYHDLMEITEKMVSGMVKHITGSYKVTYHPDGPEGQAYDVDFTPPFRRINMVEELEKALGMKLPETNLFETEETRKILDDICVAKAVECPPPRTTARLLDKLVGEFLEVTCINPTFICDHPQIMSPLAKWHRSKEGLTERFELFVMKKEICNAYTELNDPMRQRQLFEEQAKAKAAGDDEAMFIDENFCTALEYGLPPTAGWGMGIDRVAMFLTDSNNIKEVLLFPAMKPEDKKENVATTDTLESTTVGTSV

SEQ ID NO: 141 - protein, 293 aa, Homo sapiens
  human C-type lectin domain family 4, member G (CLEC4G)
MDTTRYSKWGGSSEEVPGGPWGRWVHWSRRPLFLALAVLVTTVLWAVILSILLSKASTERAALLDGHDLLRTNASKQTAALGALKEEVGDCHSCCSGTQAQLQTTRAELGEAQAKLMEQESALRELRERVTQGLAEAGRGREDVRTELFRALEAVRLQNNSCEPCPTSWLSFEGSCYFFSVPKTTWAAAQDHCADASAHLVIVGGLDEQGFLTRNTRGRGYWLGLRAVRHLGKVQGYQWVDGVSLSFSHWNQGEPNDAWGRENCVMMLHTGLWNDAPCDSEKDGWICEKRHNC

SEQ ID NO: 142 - protein, 4074 aa, Homo sapiens
  human polycystic kidney and hepatic disease 1 (autosomal recessive) (PKHD1), fibrocystin isoform 1
MTAWLISLMSIEVLLLAVRHLSLHIEPEEGSLAGGTWITVIFDGLELGVLYPNNGSQLEIHLVNVNMVVPALRSVPCDVFPVFLDLPVVTCRTRSVLSEAHEGLYFLEAYFGGQLVSSPNPGPRDSCTFKFSKAQTPIVHQVYPPSGVPGKLIHVYGWIITGRLETFDFDAEYIDSPVILEAQGDKWVTPCSLINRQMGSCYPIQEDHGLGTLQCHVEGDYIGSQNVSFSVFNKGKSMVHKKAWLISAKQDLFLYQTHSEILSVFPETGSLGGRTNITITGDFFDNSAQVTIAGIPCDIRHVSPRKIECTTRAPGKDVRLTTPQPGNRGLLFEVGDAVEGLELTEATPGYRWQIVPNASSPFGFWSQEGQPFRARLSGFFVAPETNNYTFWIQADSQASLHFSWSEEPRTKVKVASISVGTADWFDSWEQNRDEGTWQQKTPKLELLGGAMYYLEAEHHGIAPSRGMRIGVQIHNTWLNPDVVTTYLREKHQIRVRAQRLPEVQVLNVSGRGNFFLTWDNVSSQPIPANATAHLIQTTIEELLAVKCKLEPLWSNILLRLGFERGPEVSNSDGDLTSGTEPFCGRFSLRQPRHLVLTPPAAQKGYRLDQYTHLCLAYKGHMNKILKMIVSFTIGFQNMVKNTTCDWSLTRTSPESWQFDCTDLWETCVRCFGDLQPPPANSPVLVHQINLLPLAQETGLFYVDEIIIADTNVTVSQADSGTARPGGNLVESVSVVGSPPVYSVTSWLAGCGTELPLITARSVPTEGTEEGSGLVLVTTQRRQRTSPPLGGHFRIQLPNTVISDVPVQISAHHLHQLLQNNADDFTSRYLNASDFTVKEDLYTCYEHVWTLSWSTQIGDLPNFIRVSDENLTGVNPAAATRVVYDGGVFLGPIFGDMLATANQHTQVVVRVNDVPAHCPGSCSFQYLQGSTPCVHSVWYSIDGDINLMIYITGTGFSGDSQFLQVTVNKTSCKVIFSNQTNVVCQTDLLPVGMHRILMLVRPSGLAISATGEDLFLNVKPRLDMVEPSRAADIGGLWATIRGSSLEGVSLILFGSYSCAINVATSNSSRIQCKVPPRGKDGRIVNVTVIRGDYSAVLPRAFTYVSSLNPVIVTLSRNISNIAGGETLVIGVARLMNYTDLDVEVHVQDALAPVHTQSAWGLEVALPPLPAGLHRISVSINGVSIHSQGVDLHIQYLTEVFSIEPCCGSLLGGTILSISGIGFSRDPALVWVLVGNRSCDIVNLTEASIWCETLPAPQIPDAGAPTVPAAVEVWAGNRFFARGPSPSLVGKGFTFMYEAAATPVVTAMQGEITNSSLSLHVGGSNLSNSVILLGNLNCDVETQSFQGNVSLSGCSIPLHSLEAGIYPLQVRQKQMGFANMSVVLQQFAVMPRIMAIFPSQGSACGGTILTVRGLLLNSRRRSVRVDLSGPFTCVILSLGDHTILCQVSLEGDPLPGASFSLNVTVLVNGLTSECQGNCTLFIREEASPVMDALSTNTSGSLTTVLIRGQRLATTADEPMVFVDDQLPCNVTFFNASHVVCQTRDLAPGPHYLSVFYTRNGYACSGNVSRHFYIMPQVFHYFPKNFSLHGGSLLTIEGTGLRGQNTTSVYIDQQTCLTVNIGAELIRCIVPTGNGSVALEIEVDGLWYHIGVIGYNKAFTPELISISQSDDILTFAVAQISGAANIDIFIGMSPCVGVSGNHTVLQCVVPSLPAGEYHVRGYDCIRGWASSALVFTSRVIITAVTENFGCLGGRLVHVFGAGFSPGNVSAAVCGAPCRVLANATVSAFSCLVLPLDVSLAFLCGLKREEDSCEAARHTYVQCDLTVAMATEQLLESWPYLYICEESSQCLFVPDHWAESMFPSFSGLFISPKLERDEVLIYNSSCNITMETEAEMECETPNQPITVKITEIRKRWGQNTQGNFSLQFCRRWSRTHSWFPERLPQDGDNVTVENGQLLLLDTNTSILNLLHIKGGKLIFMAPGPIELRAHAILVSDGGELRIGSEDKPFQGRAQITLYGSSYSTPFFPYGVKFLAVRNGTLSLHGSLPEVIVTCLRATAHALDTVLALEDAVDWNPGDEVVIISGTGVKGAKPMEEIVTVETVQDTDLYLKSPLRYSHNFTENWVAGEHHILKATVALLSRSITIQGNLTNEREKLLVSCQEANAPEGNLQHCLYSMSEKMLGSRDMGARVIVQSFPEEPSQVQLKGVQFQVLGQAFHKHLSSLTLVGAMRESFIQGCTVRNSFSRGLSMCGTLGLKVDSNVFYNILGHALLVGTCTEMRYISWEAIHGRKDDWSGHGNIIRNNVIIQVSGAEGLSNPEMLTPSGIYICSPTNVIEGNRVCGAGYGYFFHLMTNQTSQAPLLSFTQNIAHSCTRYGLFVYPKFQPPWDNVTGTTLFQSFTVWESAGGAQIFRSSNLRLKNFKVYSCRDFGIDVLESDANTSVTDSLLLGHFAHKGSLCMSSGIKTPKRWELMVSNTTFVNFDLINCVAIRTCSDCSQGQGGFTVKTSQLKFTNSSNLVAFPFPHAAILEDLDGSLSGKNRSHILASMETLSASCLVNSSFGRVVHGSACGGGVLFHRMSIGLANTPEVSYDLTMTDSRNKTTTVNYVRDTLSNPRGWMALLLDQETYSLQSENLWINRSLQYSATFDNFAPGNYLLLVHTDLPPYPDILLRCGSRVGLSFPFLPSPGQNQGCDWFFNSQLRQLTYLVSGEGQVQVILRVKEGMPPTISASTSAPESALKWSLPETWQGVEEGWGGYNNTIPGPGDDVLILPNRTVLVDTDLPFFKGLYVMGTLDFPVDRSNVLSVACMVIAGGELKVGTLENPLEKEQKLLILLRASEGVFCDRMNGIHIDPGTIGVYGKVHLYSAYPKNSWTHLGADIASGNERIIVEDAVDWRPHDKIVLSSSSYEPHEAEVLTVKEVKGHHVRIYERLKHRHIGSVHVTEDGRHIRLAAEVGLLTRNIQIQPDVSCRGRLFVGSFRKSSREEFSGVLQLLNVEIQNFGSPLYSSVEFSNVSAGSWIISSTLHQSCGGGIHAAASHGVLLNDNIVFGTAGHGIDLEGQAYTVTNNLVVLMTQPAWSTIWVAGIKVNQVKDINLHGNVVAGSERLGFHIRGHKCSSCELLWSDNVAHSSLHGLHLYKESGLDNCTRISGFLAFKNFDYGAMLHVENSVEIENITLVDNTIGLLAVVYVFSAPQNSVKKVQIVLRNSVIVATSSSFDCIQDKVKPHSANLTSTDRAPSNPRGGRIGILWPVFTSEPNQWPQEPWHKVRNDHSISGIMKLQDVTFSSFVKSCYSDDLDVCILPNAENSGIMHPITAERTRMLKIKDKNKFYFPSLQPRKDLGKVVCPELDCASPRKYLFKDLDGRALGLPPPVSVFPKTEAEWTASFFNAGTFREEQKCTYQFLMQGFICKQTDQVVLILDSADAIWAIQKLYPVVSVTSGFVDVFSSVNANIPCSTSGSVSTFYSILPIRQITKVCFMDQTPQVLRFFLLGNKSTSKLLLAVFYHELQSPHVFLGESFIPPTLVQSASLLLNESIGANYFNIMDNLLYVVLQGEEPIEIRSGVSIHLALTVMVSVLEKGWEIVILERLTNFLQIGQNQIRFIHEMPGHEETLKAIADSRAKRKRNCPTVTCTSHYRRVGQRRPLMMEMNSHRASPPMTVETISKVIVIEIGDSPTVRSTGMISSLSSNKLQNLAHRVITAQQTGVLENVLNMTIGALLVTQSKGVIGYGNTSSFKTGNLIYIRPYALSILVQPSDGEVGNELPVQPQLVFLDEQNRRVESLGPPSEPWTISASLEGASDSVLKGCTQAETQDGYVSFYNLAVLISGSNWHFIFTVTSPPGVNFTARSKPFAVLPVTRKEKSTIILAASLSSVASWLALSCLVCCWLKRSKSRKTKPEEIPESQTNNQNIHIHISSKRRESQGPKKEDTVVGEDMRMKVMLGKVNQCPHQLMNGVSRRKVSRHIVREEEAAVPAPGTTGITSHGHICAPGAPAQQVYLQETGNWKEGQEQLLRYQLAGQNQLLLLCPDFRQERQQLPGQSRLSKQSGSLGLSQEKKASCGATEAFCLHSVHPETIQEQL

SEQ ID NO: 143 - protein, 3396 aa, Homo sapiens
  human polycystic kidney and hepatic disease 1 (autosomal recessive) (PKHD1), fibrocystin isoform 2
MTAWLISLMSIEVLLLAVRHLSLHIEPEEGSLAGGTWITVIFDGLELGVLYPNNGSQLEIHLVNVNMVVPALRSVPCDVFPVFLDLPVVTCRTRSVLSEAHEGLYFLEAYFGGQLVSSPNPGPRDSCTFKFSKAQTPIVHQVYPPSGVPGKLIHVYGWIITGRLETFDFDAEYIDSPVILEAQGDKWVTPCSLINRQMGSCYPIQEDHGLGTLQCHVEGDYIGSQNVSFSVFNKGKSMVHKKAWLISAKQDLFLYQTHSEILSVFPETGSLGGRTNITITGDFFDNSAQVTIAGIPCDIRHVSPRKIECTTRAPGKDVRLTTPQPGNRGLLFEVGDAVEGLELTEATPGYRWQIVPNASSPFGFWSQEGQPFRARLSGFFVAPETNNYTFWIQADSQASLHFSWSEEPRTKVKVASISVGTADWFDSWEQNRDEGTWQQKTPKLELLGGAMYYLEAEHHGIAPSRGMRIGVQIHNTWLNPDVVTTYLREKHQIRVRAQRLPEVQVLNVSGRGNFFLTWDNVSSQPIPANATAHLIQTTIEELLAVKCKLEPLWSNILLRLGFERGPEVSNSDGDLTSGTEPFCGRFSLRQPRHLVLTPPAAQKGYRLDQYTHLCLAYKGHMNKILKMIVSFTIGFQNMVKNTTCDWSLTRTSPESWQFDCTDLWETCVRCFGDLQPPPANSPVLVHQINLLPLAQETGLFYVDEIIIADTNVTVSQADSGTARPGGNLVESVSVVGSPPVYSVTSWLAGCGTELPLITARSVPTEGTEEGSGLVLVTTQRRQRTSPPLGGHFRIQLPNTVISDVPVQISAHHLHQLLQNNADDFTSRYLNASDFTVKEDLYTCYEHVWTLSWSTQIGDLPNFIRVSDENLTGVNPAAATRVVYDGGVFLGPIFGDMLATANQHTQVVVRVNDVPAHCPGSCSFQYLQGSTPCVHSVWYSIDGDINLMIYITGTGFSGDSQFLQVTVNKTSCKVIFSNQTNVVCQTDLLPVGMHRILMLVRPSGLAISATGEDLFLNVKPRLDMVEPSRAADIGGLWATIRGSSLEGVSLILFGSYSCAINVATSNSSRIQCKVPPRGKDGRIVNVTVIRGDYSAVLPRAFTYVSSLNPVIVTLSRNISNIAGGETLVIGVARLMNYTDLDVEVHVQDALAPVHTQSAWGLEVALPPLPAGLHRISVSINGVSIHSQGVDLHIQYLTEVFSIEPCCGSLLGGTILSISGIGFSRDPALVWVLVGNRSCDIVNLTEASIWCETLPAPQIPDAGAPTVPAAVEVWAGNRFFARGPSPSLVGKGFTFMYEAAATPVVTAMQGEITNSSLSLHVGGSNLSNSVILLGNLNCDVETQSFQGNVSLSGCSIPLHSLEAGIYPLQVRQKQMGFANMSVVLQQFAVMPRIMAIFPSQGSACGGTILTVRGLLLNSRRRSVRVDLSGPFTCVILSLGDHTILCQVSLEGDPLPGASFSLNVTVLVNGLTSECQGNCTLFIREEASPVMDALSTNTSGSLTTVLIRGQRLATTADEPMVFVDDQLPCNVTFFNASHVVCQTRDLAPGPHYLSVFYTRNGYACSGNVSRHFYIMPQVFHYFPKNFSLHGGSLLTIEGTGLRGQNTTSVYIDQQTCLTVNIGAELIRCIVPTGNGSVALEIEVDGLWYHIGVIGYNKAFTPELISISQSDDILTFAVAQISGAANIDIFIGMSPCVGVSGNHTVLQCVVPSLPAGEYHVRGYDCIRGWASSALVFTSRVIITAVTENFGCLGGRLVHVFGAGFSPGNVSAAVCGAPCRVLANATVSAFSCLVLPLDVSLAFLCGLKREEDSCEAARHTYVQCDLTVAMATEQLLESWPYLYICEESSQCLFVPDHWAESMFPSFSGLFISPKLERDEVLIYNSSCNITMETEAEMECETPNQPITVKITEIRKRWGQNTQGNFSLQFCRRWSRTHSWFPERLPQDGDNVTVENGQLLLLDTNTSILNLLHIKGGKLIFMAPGPIELRAHAILVSDGGELRIGSEDKPFQGRAQITLYGSSYSTPFFPYGVKFLAVRNGTLSLHGSLPEVIVTCLRATAHALDTVLALEDAVDWNPGDEVVIISGTGVKGAKPMEEIVTVETVQDTDLYLKSPLRYSHNFTENWVAGEHHILKATVALLSRSITIQGNLTNEREKLLVSCQEANAPEGNLQHCLYSMSEKMLGSRDMGARVIVQSFPEEPSQVQLKGVQFQVLGQAFHKHLSSLTLVGAMRESFIQGCTVRNSFSRGLSMCGTLGLKVDSNVFYNILGHALLVGTCTEMRYISWEAIHGRKDDWSGHGNIIRNNVIIQVSGAEGLSNPEMLTPSGIYICSPTNVIEGNRVCGAGYGYFFHLMTNQTSQAPLLSFTQNIAHSCTRYGLFVYPKFQPPWDNVTGTTLFQSFTVWESAGGAQIFRSSNLRLKNFKVYSCRDFGIDVLESDANTSVTDSLLLGHFAHKGSLCMSSGIKTPKRWELMVSNTTFVNFDLINCVAIRTCSDCSQGQGGFTVKTSQLKFTNSSNLVAFPFPHAAILEDLDGSLSGKNRSHILASMETLSASCLVNSSFGRVVHGSACGGGVLFHRMSIGLANTPEVSYDLTMTDSRNKTTTVNYVRDTLSNPRGWMALLLDQETYSLQSENLWINRSLQYSATFDNFAPGNYLLLVHTDLPPYPDILLRCGSRVGLSFPFLPSPGQNQGCDWFFNSQLRQLTYLVSGEGQVQVILRVKEGMPPTISASTSAPESALKWSLPETWQGVEEGWGGYNNTIPGPGDDVLILPNRTVLVDTDLPFFKGLYVMGTLDFPVDRSNVLSVACMVIAGGELKVGTLENPLEKEQKLLILLRASEGVFCDRMNGIHIDPGTIGVYGKVHLYSAYPKNSWTHLGADIASGNERIIVEDAVDWRPHDKIVLSSSSYEPHEAEVLTVKEVKGHHVRIYERLKHRHIGSVHVTEDGRHIRLAAEVGLLTRNIQIQPDVSCRGRLFVGSFRKSSREEFSGVLQLLNVEIQNFGSPLYSSVEFSNVSAGSWIISSTLHQSCGGGIHAAASHGVLLNDNIVFGTAGHGIDLEGQAYTVTNNLVVLMTQPAWSTIWVAGIKVNQVKDINLHGNVVAGSERLGFHIRGHKCSSCELLWSDNVAHSSLHGLHLYKESGLDNCTRISGFLAFKNFDYGAMLHVENSVEIENITLVDNTIGLLAVVYVFSAPQNSVKKVQIVLRNSVIVATSSSFDCIQDKVKPHSANLTSTDRAPSNPRGGRIGILWPVFTSEPNQWPQEPWHKVRNDHSISGIMKLQDVTFSSFVKSCYSDDLDVCILPNAENSGIMHPITAERTRMLKIKDKNKFYFPSLQPRKDLGKVVCPELDCASPRKYLFKDLDGRALGLPPPVSVFPKTEAEWTASFFNAVTTEQALKISE

SEQ ID NO: 144 - protein, 872 aa, Homo sapiens
  human coiled-coil domain containing 147 (CCDC147)
MAEEKGGKQVLEESAFEEMERDFQGVLHELSGDKSLEKFRIEYERLHAVMKKSYDNEKRLMAKCRELNAEIVVNSAKVATALKLSQDDQTTIASLKKEIEKAWKMVDSAYDKEQKAKETILALKEEIVNLTKLVEQGSGLSMDQHSNIRDLLRFKEEVTKERDQLLSEVVKLRESLAQTTEQQQETERSKEEAEHAISQFQQEIQQRQNEASREFRKKEKLEKELKQIQADMDSRQTEIKALQQYVQKSKEELQKLEQQLKEQKILNERAAKELEQFQMRNAKLQQENEQHSLVCEQLSQENQQKALELKAKEEEVHQMRLDIGKLNKIREQIHKKLHHTEDQKAEVEQHKETLKNQIVGLEREVEASKKQAELDRKAMDELLRERDILNKNMLKAVNATQKQTDLVKLHEQAKRNLEGEIQNYKDEAQKQRKIIFHLEKERDRYINQASDLTQKVLMNMEDIKVRETQIFDYRKKIAESEIKLKQQQNLYEAVRSDRNLYSKNLVEAQDEITDMKRKLKIMIHQVDELKEDISAKESALVKLHLEQQRIEKEKETLKAELQKLRQQALETKHFIEKQEAEERKLLRIIAEADGERLRQKKELDQVISERDILGSQLVRRNDELALLYEKIKIQQSVLNKGESQYNQRLEDMRILRLEIKKLRREKGILARSMANVEELRQEFFHMQRELLKERTRCRALEEELENPLNVHRWRKLEASDPNAYELIQKIHTLQKRLISKTEEVVEKELLLQEKEKLYMELKHVLARQPGPEAAEQLKLYRRTLHDKKQQLKVLSSELNMYEVQSKEYKYEVEKLTNELQNLKKKYLAQKRKEQLQKNKDTAPMDNTFLMVKPNGPGFTGGGFPLRSTKMTF

SEQ ID NO: 145 - DNA, 7737 bp, Homo sapiens
  human core-binding factor, runt domain, alpha subunit 2 translocated to, 2 (CBFA2T2), transcript variant 2, protein CBFA2T2 isoform MTGR1b cDNA
ggagggagaaaaagagagagactgactgtatctggggattctggcaaggtgaagagctggtctgtttggcaggaccttcccatctgggatccatctgtgtttccctggaatgggacaggcagctctagtcagtgagaaatcgcagatgtgagagagctgacacatgtccagctaatgaaaggaggaggaaggctggtctccgattgagctttgaagattaggaggagaaaaagaggagctttggaatatctatttcaaataaatttggtgtatttaagaatctggattgtttataatttgggcatttgggaggtggggttttgccatgttgcccaggtgggtctcaaactcctgggctaaagcgatcttcccatgttggctgcccaaagtgctgggattacaggcaagagccaccataccagttcctgtctagatattatgatgaagattgaggatggtagtttttgtggagcacaatcctgactgtacctgtgatgttgcattcatcttttggaacataagcagatcaccaggtgaatggctaaagaatctggaataagcttgaaagaaatacaggtcctggcaaggcaatggaaagttggtcctgagaaaagggtgccagcgatgcctggatcgcctgtggaagtgaagatacagtccagatcctcacctcccaccatgccacccctcccaccaataaatcctggaggaccgaggccagtgtccttcactcctactgcattaagcaatggcatcaaccattctcctcctaccctgaatggtgccccatcaccgccacagagattcagcaatggtcctgcctcctccacatcatctgcactcacaaatcagcaattgccagccacttgtggtgctcgacaactcagcaagttgaaacgctttcttaccactctgcaacagtttggcaatgacatctcccctgagattggggagaaggtgcggactcttgttcttgcactggtgaactcaacagtgacaattgaggaattccactgtaagctccaagaagccacaaactttccccttcgtccttttgtgattccatttctcaaggccaacctgcccctgctgcagcgggaactgctgcactgcgctcgggcggccaagcagaccccatcccagtacctggctcagcacgaacaccttctgctcaacacaagcattgcatcgcctgctgactcgtcagagttgctcatggaggtgcacggaaatgggaagaggcccagtccagagaggagagaagagaatagttttgatagagacacaattgctcctgagcctcctgccaagagagtatgtaccatcagccctgctcctcggcacagtcctgctctcactgtgcccctcatgaatcccgggggccaattccatcctacccctccacctcttcagcattacaccttagaggatattgcaacttctcacctgtatcgggaacccaacaagatgctagagcatcgagaagttcgtgatagacaccacagtcttggtctaaatggaggctatcaagatgagttggtagatcatcgtttgacagaaagggaatgggctgatgaatggaaacatcttgaccatgcgctgaattgcattatggaaatggtagagaaaacaaggcgctctatggcagttctgcggcgctgtcaggaatcagatcgtgaagaactcaactactggaaaagacggtacaatgaaaacacagagctgaggaaaacggggaccgagttggtctccaggcagcacagccctgggagtgcagattctctcagcaatgattctcagagagagttcaacagcaggccaggtacaggatacgtacctgtggagttttggaaaaaaacagaagaagctgtgaataaggtgaaaattcaggccatgtcagaagtacagaaggccgtcgctgaggcagagcagaaagcctttgaagtgattgcaacagagagagcacgaatggagcaaaccatagcggatgtcaagcggcaggccgcagaggatgctttcctcgtcatcaatgagcaagaggagtccacggagaactgctggaactgtggccgcaaagccagcgagacatgcagtggctgcaatatcgcgcgatactgtggctctttctgccagcacaaggactgggagcggcaccaccgcctctgtggtcagaacctgcatggccagagcccccacggccagggccggccgctgcttcctgtaggcaggggctcctctgccaggtccgccgactgcagcgtgcccagcccagccctcgacaagacctcggcaaccacatcgcgttcctcaacacctgcttctgtgacagctatcgacaccaacggactctgagccccggactctgcttaccctgatggctgctcagcaccacagagtgcttgggctgagggactgactgttggaacccgtgcatgtagctgccgggtcatcagcaagaaatgaattggaggcaggaagagtccaagcctgaataataacaccccacagcctctctgtgcacttgctgtctgcggagccagtgtgccattctctgcacatgggcagccagcctgagctgcctcctccatggctttcctggtttgttcctctctccactgaagctgacttagccggccccttttcagtgtagaccaccagctcccctccccatctccttgagtcagcagactgtccaatgtgctcagccaggctggaggcggcaggcggcaggcagcaggctgtggaggaggcccctcggtcagggagcggcctgcctcacccctgaatagctccttcggccccatctccatcctcagcagatgacactgattggcctcacggggacttgggtaagcaacaggcggcattcaggactcttctcaaccctgctgttcagacttgataagatctcagagtccacaggaaagaagtcactgttgcaataaaagcacccgtagtagcaaaaacataaaacaaataaaacttcccccacatcacagatgattttggacaagattttccaaccttgctggctactttagtttgggacctgttttttttctcatttgattttgcttgtgcagaaaatagtttccagcacatggattgatctgagagagaatgaggctcagttgtggatagtctgttttctctgagcatgttggccaactagtatcgtcaaattattgagtggatcatctcttggaaatgcagaacttctgccaccacttggctatttgcacagtcatcttgttctgtgtccttttatctctcagaccacacacatctggaacgctgtgggcatcttctgcccatgggctccatttggcacctgctgagccacagttgtcctgctggatgtgctgtgcaggttggtaggacttgcccccactgtcaaggcctggtctcatctgaaaagccctcctggacctcaaagaattcttcagacctcatagttacaggtcattatatctactatgttgatttatcatcaggcacacaacttctgtttccttctcttgtgttatctgatagcgtccctccttgagctcatcagaaaggttttatgaaatgtgaaccattttgggaaaagctgatcaatttttcttcctagcttcccattttcaaatgggacatcactcatatccctttcagaatgttaggaactgcctcccacattcttccctgtctttttgggttttgttttttgttgttgtggtggttttttaacacaaagtctcactctgttgcccaggctggagtgcagtggcatgatcttggctcactgcaacctctgccttccaggttcaagcaattctcctgcctcagcctcccgagtagctgagattacaggcgcccaccaccacgcccagctaatttttgtatttttagtagagacagggtttcaccatgttggccaggctgatctcgaactcctgacctcaggtgacctgccttggcctcccaaagtgcagggattacaagcgtgagccaccatgcccggcctgtctttttggttttgatgggagtctgaggaccccgacccctcctgctctccatctttgagcctctggcatcctctcacacccagaaatcagttggagtaagtttaattggccctgctccagctggcctttgaagcacaagtttaaatctccaccttctgtgcactgaccagagtctaaaataaaagttgtcagtaccataaaggaaaagggatccacacaggtagccttctccttggatacaggtacatcttactgtaagaatttcaagtcctggctgggcgcagtggctcactcctgtaatcccagcactttgagagaccgaggcaggcagatcacttgaggtcaggaattcaagaccaacctggccaacatggtgaaaccctgtctctaataaaaaaaaaatagaaaaatcagccgggtgtggtggcacacacctgtaatcctagctactcaggaggctgaggcaagagaatctcttgaacctgtgagccagaggttgcagtgagccgagattccaccactgcactccagcctgggcaacagagcaaaactctgtctcaaaaaaaaaaaaaaaaaggcaaaattaaagaatttcaagtccctaatttactctaaccaagcattttcagtcttacaaagaaatctagtgcacgacacctttaaaatgcctagatttccattgcctaaagtaaggtgtgaccagtgaaacaacagcagagaatcatgttcctttgctgtggaacacataagccccacagttttccagtcagcctaatacatgggtatcccccgaccccatctgcctccttaagccacagtccttggtggggaactctaagggggacggagtcagtaccccggacagggccacatttgcatgagacatggctgtctcacaggtcacagagccattacaacagcttactagtttttcatggatttgttggattaacaccttaagcaggttttttattgttattttgtttgtttgtttgttttgagacgggagtttctctcttgtctcccaggctggagtgcaatcgcgcaatctcggctcacggtaacctctgcctcccaggttcaagcgagtctcctgcctcagccttctgagtagctgggattacaggcatgcgccaccacgcccaactaattttgtatttttagtagagacggggtttctccttgttggtcaggctggtctcaaaccccggacctcaggtgatccccccaccttggcctcccaaagtgccaggattacaggcatgagccactgtgtccggtcttgagcaggtttttaaaatctccagtggccataaaactagccagggtagctcatgcttttactggttggaataaggagccaaaaccaacaaaataatatttattagggctcgatgcccatttctgtggctaaggcttaggtttggtgtgcagagcctggcctgctcttgtgggctgtggttgctgtgacagtttcgttttctgaatctttgtaatgctcttccaccctgctcgtgctgcccagaggctgatctgcaaacctgggcagtattccacactgaagctcagtttgcaaaccttctgctgtgttaattctggtcagtttcacacagaagtcacgagggcctctgcccaggaccttctattcacatttcaagaatccctttctgaaattctccaactctctggtcaggaggaggagcaccattggggcggggtaggcagctagaggcgcaggagcgaatccaggttccttgcgtggttcccagcctctgctgacagcacctcagctaccaggtggggagtggaaattcagcctgcttagaggactgacctctacagttcatatttgcagtgacataaaaggcaaagaggagctggcatggtggtacagaaggtatcagtcaagcgcaggctcttcagaaacctagaaactaaaaagagatgcaacatgtgactggccatcagccagacatgtctagggtgagaccagtgctcagcaccacccgccaaggaacactgatgagttgtgggacattatggtcggccaagtgaggaatgattgcagggaccagagaagaccaaagatgccagatgtccccagagtttcttgagggctgggtttcacgtctttgcttgtcctttttgtccccacttgcctgcaccgtgcctgactcatccagtggggaaggtgactcaagaagttgtttaagcctaggcctaggcagtccacttcgggaggtgggggcactccacactggggggccctgcagctccagggctggtgctctagcagatccgctcaggcacggttgggtgaccgtggggtcaccgattgcgtagattatttctagggcagtgctgggttagaaatgtctgtctggaaacaggacacatcttgccaccacaagtccacacctggccttggctgctgcccgctctctgcagcgtggatttcctttgcccatttgggccagaaggtcaccaggagttcatcactgcttagtgtcaacttgacatcttcagcttccagacagaaaacccatgctttactttgtacagccctgtcccagagttagtaagcctcggcttgtcacctgcttgcaaagggtatagacatcattctgggtagttctagaggatatcgcaacaagtgcgtttgaaggttcagcacagctggaattgtacggtagtgagctcttcaaaatgaaaacagaatgaccggatggccatctgtcctggaaactgtagaattgaataaatcactgaaaatagaacacttcttggaggctttcttcagaactgaactagaaacaaggtttccaggctcccaggtcagtagaccaaaccaacttccttagatttttttttttaagctgtttgcagaaaactgggtggtagcgtgtctgaaccaaacggaagaatagccagcggagcatggactgttccagcacgggccagatggccagctgtcgagagcagccctgcccagattgcggtgggggctgtgccagcggctccgcagggcccttccaactctggagtgtctgtagttcttgtgaaaccaaaacgttgactacctgcctctttcctcgggcatcgacgtgctcatttccaaagatgatggtgcaggtgaccttttccatcgtgagctaagagaaggttaggaggcctgaggggcgggccttgtgtcccctcctccccctccacagcccctgaggtggagcttccctcacagaccccatctggtcgagcctacggctgcccagtgtacactcagtgatgcttataccaaatagggcatgtgcgctggtgtctgttggggacagccccatccctaccttggagtcggcagagaagcagcaataagcattaggcgaatgattgaaagggctgctgcgccaagaggccttcagtccccttaacgtggctttccaacttcctgacgaggctacaaaggctccgctcacaaaagaaagccaataatgtaaataaatagaaaacgaagcctccacgcgtggtttttaaagggggatgatgaatgtgacaccacccacagaatgcattagaatctggtttttctgtgctttgtcattttactctgataggaatttttgttacctaactctgtgcataacttatttaatgtactgtataaatgaaccaaaactgttaaatatgtatttagtttgttctacttaaagtagtcaataaaaaggctatattcctt

SEQ ID NO: 146 - DNA, 1892 bp, Homo sapiens
  human hydroxysteroid (17-beta) dehydrogenase 11 (HSD17B11), estradiol 17-beta-dehydrogenase 11 cDNA
gtccctcccagatctctgagctagcaagcactgcagcccgagccaattgcgaaagaccaacaaagcccagcccagcggaaggaacggtttcggagttgtttttctttgatacgggagttcctccttgctctcgcccctactctttctggtgttagatcgagctaccctctaaaagcagtttagagtggtaaaaaaaaaaaaaaacacaccaaacgctcgcagccacaaaagggatgaaatttcttctggacatcctcctgcttctcccgttactgatcgtctgctccctagagtccttcgtgaagctttttattcctaagaggagaaaatcagtcaccggcgaaatcgtgctgattacaggagctgggcatggaattgggagactgactgcctatgaatttgctaaacttaaaagcaagctggttctctgggatataaataagcatggactggaggaaacagctgccaaatgcaagggactgggtgccaaggttcatacctttgtggtagactgcagcaaccgagaagatatttacagctctgcaaagaaggtgaaggcagaaattggagatgttagtattttagtaaataatgctggtgtagtctatacatcagatttgtttgctacacaagatcctcagattgaaaagacttttgaagttaatgtacttgcacatttctggactacaaaggcatttcttcctgcaatgacgaagaataaccatggccatattgtcactgtggcttcggcagctggacatgtctcggtccccttcttactggcttactgttcaagcaagtttgctgctgttggatttcataaaactttgacagatgaactggctgccttacaaataactggagtcaaaacaacatgtctgtgtcctaatttcgtaaacactggcttcatcaaaaatccaagtacaagtttgggacccactctggaacctgaggaagtggtaaacaggctgatgcatgggattctgactgagcagaagatgatttttattccatcttctatagcttttttaacaacattggaaaggatccttcctgagcgtttcctggcagttttaaaacaaaaaatcagtgttaagtttgatgcagttattggatataaaatgaaagcgcaataagcacctagttttctgaaaactgatttaccaggtttaggttgatgtcatctaatagtgccagaattttaatgtttgaacttctgttttttctaattatccccatttcttcaatatcatttttgaggctttggcagtcttcatttactaccacttgttctttagccaaaagctgattacatatgatataaacagagaaatacctttagaggtgactttaaggaaaatgaagaaaaagaaccaaaatgactttattaaaataatttccaagattatttgtggctcacctgaaggctttgcaaaatttgtaccataaccgtttatttaacatatatttttatttttgattgcacttaaattttgtataatttgtgtttctttttctgttctacataaaatcagaaacttcaagctctctaaataaaatgaaggactatatctagtggtatttcacaatgaatatcatgaactctcaatgggtaggtttcatcctacccattgccactctgtttcctgagagatacctcacattccaatgccaaacatttctgcacagggaagctagaggtggatacacgtgttgcaagtataaaagcatcactgggatttaaggagaattgagagaatgtacccacaaatggcagcaataataaatggatcacacttaaacttttggtgtttccatctttttgtcttaaacagaacatgacaaccttcaaattaaaggaaaataaattgtgaaaaaaaaaaaaaaaaaaa

SEQ ID NO: 147 - DNA, 5292 bp, Homo sapiens
  human low density lipoprotein receptor (LDLR) precursor, transcript variant 1 cDNA
ctcttgcagtgaggtgaagacatttgaaaatcaccccactgcaaactcctccccctgctagaaacctcacattgaaatgctgtaaatgacgtgggccccgagtgcaatcgcgggaagccagggtttccagctaggacacagcaggtcgtgatccgggtcgggacactgcctggcagaggctgcgagcatggggccctggggctggaaattgcgctggaccgtcgccttgctcctcgccgcggcggggactgcagtgggcgacagatgcgaaagaaacgagttccagtgccaagacgggaaatgcatctcctacaagtgggtctgcgatggcagcgctgagtgccaggatggctctgatgagtcccaggagacgtgcttgtctgtcacctgcaaatccggggacttcagctgtgggggccgtgtcaaccgctgcattcctcagttctggaggtgcgatggccaagtggactgcgacaacggctcagacgagcaaggctgtccccccaagacgtgctcccaggacgagtttcgctgccacgatgggaagtgcatctctcggcagttcgtctgtgactcagaccgggactgcttggacggctcagacgaggcctcctgcccggtgctcacctgtggtcccgccagcttccagtgcaacagctccacctgcatcccccagctgtgggcctgcgacaacgaccccgactgcgaagatggctcggatgagtggccgcagcgctgtaggggtctttacgtgttccaaggggacagtagcccctgctcggccttcgagttccactgcctaagtggcgagtgcatccactccagctggcgctgtgatggtggccccgactgcaaggacaaatctgacgaggaaaactgcgctgtggccacctgtcgccctgacgaattccagtgctctgatggaaactgcatccatggcagccggcagtgtgaccgggaatatgactgcaaggacatgagcgatgaagttggctgcgttaatgtgacactctgcgagggacccaacaagttcaagtgtcacagcggcgaatgcatcaccctggacaaagtctgcaacatggctagagactgccgggactggtcagatgaacccatcaaagagtgcgggaccaacgaatgcttggacaacaacggcggctgttcccacgtctgcaatgaccttaagatcggctacgagtgcctgtgccccgacggcttccagctggtggcccagcgaagatgcgaagatatcgatgagtgtcaggatcccgacacctgcagccagctctgcgtgaacctggagggtggctacaagtgccagtgtgaggaaggcttccagctggacccccacacgaaggcctgcaaggctgtgggctccatcgcctacctcttcttcaccaaccggcacgaggtcaggaagatgacgctggaccggagcgagtacaccagcctcatccccaacctgaggaacgtggtcgctctggacacggaggtggccagcaatagaatctactggtctgacctgtcccagagaatgatctgcagcacccagcttgacagagcccacggcgtctcttcctatgacaccgtcatcagcagagacatccaggcccccgacgggctggctgtggactggatccacagcaacatctactggaccgactctgtcctgggcactgtctctgttgcggataccaagggcgtgaagaggaaaacgttattcagggagaacggctccaagccaagggccatcgtggtggatcctgttcatggcttcatgtactggactgactggggaactcccgccaagatcaagaaagggggcctgaatggtgtggacatctactcgctggtgactgaaaacattcagtggcccaatggcatcaccctagatctcctcagtggccgcctctactgggttgactccaaacttcactccatctcaagcatcgatgtcaacgggggcaaccggaagaccatcttggaggatgaaaagaggctggcccaccccttctccttggccgtctttgaggacaaagtattttggacagatatcatcaacgaagccattttcagtgccaaccgcctcacaggttccgatgtcaacttgttggctgaaaacctactgtccccagaggatatggttctcttccacaacctcacccagccaagaggagtgaactggtgtgagaggaccaccctgagcaatggcggctgccagtatctgtgcctccctgccccgcagatcaacccccactcgcccaagtttacctgcgcctgcccggacggcatgctgctggccagggacatgaggagctgcctcacagaggctgaggctgcagtggccacccaggagacatccaccgtcaggctaaaggtcagctccacagccgtaaggacacagcacacaaccacccgacctgttcccgacacctcccggctgcctggggccacccctgggctcaccacggtggagatagtgacaatgtctcaccaagctctgggcgacgttgctggcagaggaaatgagaagaagcccagtagcgtgagggctctgtccattgtcctccccatcgtgctcctcgtcttcctttgcctgggggtcttccttctatggaagaactggcggcttaagaacatcaacagcatcaactttgacaaccccgtctatcagaagaccacagaggatgaggtccacatttgccacaaccaggacggctacagctacccctcgagacagatggtcagtctggaggatgacgtggcgtgaacatctgcctggagtcccgtccctgcccagaacccttcctgagacctcgccggccttgttttattcaaagacagagaagaccaaagcattgcctgccagagctttgttttatatatttattcatctgggaggcagaacaggcttcggacagtgcccatgcaatggcttgggttgggattttggtttcttcctttcctcgtgaaggataagagaaacaggcccggggggaccaggatgacacctccatttctctccaggaagttttgagtttctctccaccgtgacacaatcctcaaacatggaagatgaaaggggaggggatgtcaggcccagagaagcaagtggctttcaacacacaacagcagatggcaccaacgggaccccctggccctgcctcatccaccaatctctaagccaaacccctaaactcaggagtcaacgtgtttacctcttctatgcaagccttgctagacagccaggttagcctttgccctgtcacccccgaatcatgacccacccagtgtctttcgaggtgggtttgtaccttccttaagccaggaaagggattcatggcgtcggaaatgatctggctgaatccgtggtggcaccgagaccaaactcattcaccaaatgatgccacttcccagaggcagagcctgagtcactggtcacccttaatatttattaagtgcctgagacacccggttaccttggccgtgaggacacgtggcctgcacccaggtgtggctgtcaggacaccagcctggtgcccatcctcccgacccctacccacttccattcccgtggtctccttgcactttctcagttcagagttgtacactgtgtacatttggcatttgtgttattattttgcactgttttctgtcgtgtgtgttgggatgggatcccaggccagggaaagcccgtgtcaatgaatgccggggacagagaggggcaggttgaccgggacttcaaagccgtgatcgtgaatatcgagaactgccattgtcgtctttatgtccgcccacctagtgcttccacttctatgcaaatgcctccaagccattcacttccccaatcttgtcgttgatgggtatgtgtttaaaacatgcacggtgaggccgggcgcagtggctcacgcctgtaatcccagcactttgggaggccgaggcgggtggatcatgaggtcaggagatcgagaccatcctggctaacacgtgaaaccccgtctctactaaaaatacaaaaaattagccgggcgtggtggcgggcacctgtagtcccagctactcgggaggctgaggcaggagaatggtgtgaacccgggaagcggagcttgcagtgagccgagattgcgccactgcagtccgcagtctggcctgggcgacagagcgagactccgtctcaaaaaaaaaaaacaaaaaaaaaccatgcatggtgcatcagcagcccatggcctctggccaggcatggcgaggctgaggtgggaggatggtttgagctcaggcatttgaggctgtcgtgagctatgattatgccactgctttccagcctgggcaacatagtaagaccccatctcttaaaaaatgaatttggccagacacaggtgcctcacgcctgtaatcccagcactttgggaggctgagctggatcacttgagttcaggagttggagaccaggcctgagcaacaaagcgagatcccatctctacaaaaaccaaaaagttaaaaatcagctgggtacggtggcacgtgcctgtgatcccagctacttgggaggctgaggcaggaggatcgcctgagcccaggaggtggaggttgcagtgagccatgatcgagccactgcactccagcctgggcaacagatgaagaccctatttcagaaatacaactataaaaaaataaataaatcctccagtctggatcgtttgacgggacttcaggttctttctgaaatcgccgtgttactgttgcactgatgtccggagagacagtgacagcctccgtcagactcccgcgtgaagatgtcacaagggattggcaattgtccccagggacaaaacactgtgtcccccccagtgcagggaaccgtgataagcctttctggtttcggagcacgtaaatgcgtccctgtacagatagtggggattttttgttatgtttgcactttgtatattggttgaaactgttatcacttatatatatatatatacacacatatatataaaatctatttatttttgcaaaccctggttgctgtatttgttcagtgactattctcggggccctgtgtagggggttattgcctctgaaatgcctcttctttatgtacaaagattatttgcacgaactggactgtgtgcaacgctttttgggagaatgatgtccccgttgtatgtatgagtggcttctgggagatgggtgtcactttttaaaccactgtatagaaggtttttgtagcctgaatgtcttactgtgatcaattaaatttcttaaatgaaccaatttgtctaaaaaaaaaaa

SEQ ID NO: 148 - DNA, 3882 bp, Homo sapiens
  human microtubule associated monoxygenase, calponin and LIM domain containing 1 (MICAL)-like protein 1 (MICALL1) cDNA
ggaaaccgggcccgcgcggcggccgccgtcccggccaagccggggccccgaagccagagccggagccgggcgggccgcggggtcatggctgggccgcggggcgcgctgctggcctggtgccgccgccagtgcgagggctaccgcggcgtggagatccgcgacctgagcagctccttccgggacggcctggccttctgcgccatcctgcaccggcaccggcccgacctgctagattttgattcgctttccaaggacaatgtcttcgagaataaccgtttggcctttgaagtggctgagaaggagctggggatccccgctctcctggaccccaatgacatggtctccatgagcgtccctgactgcctcagcatcatgacctatgtgtcccagtattacaaccacttctgcagtcctggccaagctggtgtctcgccacccagaaagggccttgcaccctgttccccgccgtctgtagcacccactccagtggaaccagaagatgtggctcagggcgaggagctctcctcaggcagcctgtcagagcagggcaccggccagacccccagcagcacgtgcgcagcctgccagcagcatgtgcacttggtgcagcgctacctggctgacggcaggctgtaccatcgccactgcttccggtgtcggcggtgctccagcaccctgctccctggggcttatgagaatgggcctgaggagggcacctttgtgtgtgcagaacactgtgccaggctgggcccggggacacggtcggggaccaggcctgggcccttctcacagccaaagcagcagcaccagcagcaactcgcagaagatgccaaggatgttccaggaggcggccccagctccagtgctcctgcaggggctgaggccgatggacccaaggccagccctgaggcccggccgcagatccctaccaagccccgggttcctggcaaactacaggagctggccagcccccctgcgggccgccccacccctgcccccaggaaggcctctgagagcaccaccccagcaccccccacgccccggccccgctccagtctgcagcaggagaacctggtggagcaggctggcagcagcagcctggtgaacgggagactgcacgaactgcctgtccccaagccgagggggacaccgaagccgtccgaggggacaccagcccccaggaaggaccccccatggatcacgctggtgcaggcagaaccaaagaagaagccagccccacttcccccaagcagcagcccggggccaccaagccaggacagcaggcaggtggagaatggaggcaccgaggaggtggcccagccgagcccaacggccagcctggagtccaaaccctataacccctttgaggaggaggaggaggacaaggaggaagaggctccagctgcacccagcctggccaccagccctgccctgggccacccggagtccacacccaagtccctgcacccctggtacggcatcacccctaccagcagccccaagacaaagaagcgccctgccccgcgcgcacccagcgcgtccccactggctctccacgcctcccgcctctcgcactcggagccgccctcggccacaccatcgccagcgctcagcgtggagagcctgtcgtctgagagcgccagccagactgcaggtgcagagcttctggagccgccagctgtgcccaagagctcctcagagcctgctgtccatgcccctggtacccctggaaaccctgtcagcctctctaccaactcctccctggcctcctctggggaactagtggagcctagagtggaacaaatgcctcaagccagccctggccttgcccccaggaccaggggcagctcaggtccccagccagccaagccctgcagtggcgccaccccaacgcctctcttgttggttggagacaggagcccggtgccttcccctggaagctcgtccccacagctgcaggtaaagtcctcctgcaaggagaatccttttaaccggaagccatcacctgcagcgtccccagccacaaagaaggccaccaagggatccaagccagtgaggccacctgcccctggacacggctttccactcatcaaacgcaaggtccaggctgaccagtacatccctgaggaggacatccatggagagatggataccattgagcgccggctggatgccctggagcaccgtggggtgctgctggaggagaagctgcgtggcggcctgaatgagggccgtgaggatgacatgctggtggactggttcaagctcatccacgagaagcacctactggtgcggcgagagtccgagctcatctatgtcttcaagcagcagaacctggagcagcgccaggctgatgtcgagtatgagctccggtgcctcctcaataagccagaaaaggactggacggaggaggaccgggcccgggagaaggtgctgatgcaggagcttgtgaccctcattgagcagcgcaacgctatcatcaactgcctggatgaggaccggcagagggaggaagaggaagacaagatgttggaagccatgatcaagaagaaagagttccagagggaggctgaacctgagggcaagaagaaggggaagttcaagaccatgaagatgttgaaactgctaggaaacaaacgtgatgccaagagcaagtcccccagagacaagagctaacagcacgagaagccagttggggactgccccctcctggagcagctcctgggctgtgctctgtttgaagggggcgccctgctcccctcagatcagtcaggaggaagatgactaaggggagggatcctctgggtgatggcctcttcctcctcagggacctctgactgctctgggccaaagaatctcttgtttcttctccgagccccaggcagcggtgattcagccctgcccaacctgattctgatgactgcggatgctgtgacggacccaaggggcaaatagggtcccagggtccagggaggggcgcctgctgagcacttccgcccctcaccctgcccagcccctgccatgagctctgggctgggtctccgcctccagggttctgctcttccaggcaggccagcaagtggcgctgggccacactggcttcttcctgccccatccctggctctgagtctctgtcttcctgtcctgtgcaggcgcccttggatctcagtttccctcactcaggaactctgtttctgaagtcttcagttaagtttgagtttatgactgagtggcctgtactgtcagacgtgaatgggcctgacgggcaaatccatccctctctccctcacagttccaggagcggcttccctcgtctccccttactccacagggagcctcccttgccaggaccagggctgcgacggccatgctggggcaggtgagtgctctgttagctgctcccagtgctgtccccaggctgcagttctggtccctggttgtcaggtaggaagggtgcacttgaagcaggtgctcatctcggttccttaacgtttatagtctgacccctcacttaggctttcctctgccaccccggtccagggaagaggctcgctcccgcccatggtcatcactggtctgtctgctctgttgtctgttctttccctgactccctcccaccgaaggcctgatggctactcacccctctgggatggctatgggagaggaggagtgatggggaccgccaccttttctgcaggaaatgtgcccagcagctcttggtcaaagcactgttgctataagctatctctgggatgcctctaggcccccttccctctacacacctctgggaaaagattacactgtattaactctcgaggagtttcctcaccaataaacagacaacctcaactgccagtgccctgcaaaaaaaaaaaaaaaaaa

SEQ ID NO: 149 - DNA, 3223 bp, Homo sapiens
  human RAB7, member RAS oncogene family-like 1, transcript variant 2, ras-related protein Rab-7L1 (RAB7L1) isoform 1 cDNA
agtgccacaggcaaccctgcacgtgacgcttgcggaggaaggggagagagaggcgcgcgggagggcgtctagggaatcgaggtgccggctgctccttcctcacaatttgcccagacaggcggtgggtgggaatgcctcacttcagtttgaagagggtccggatccaaaggggttaaaacgagcgacccccgatccccgaccacacttcccgcctccctaaaacgcacaccccgctagccatgggcagccgcgaccacctgttcaaagtgctggtggtgggggacgccgcagtgggcaagacgtcgctggtgcagcgatattcccaggacagcttcagcaaacactacaagtccacggtgggagtggattttgctctgaaggttctccagtggtctgactacgagatagtgcggcttcagctgtgggatattgcagggcaggagcgcttcacctctatgacacgattgtattatcgggatgcctctgcctgtgttattatgtttgacgttaccaatgccactaccttcagcaacagccagaggtggaaacaggacctagacagcaagctcacactacccaatggagagccggtgccctgcctgctcttggccaacaagtgtgatctgtccccttgggcagtgagccgggaccagattgaccggttcagtaaagagaacggtttcacaggttggacagaaacatcagtcaaggagaacaaaaatattaatgaggctatgagagtcctcattgaaaagatgatgagaaattccacagaagatatcatgtctttgtccacccaaggggactacatcaatctacaaaccaagtcctccagctggtcctgctgctagtagtgtttggcttattttccatcccagttctgggaggtcttttaagtctcttccctttggttgcccacctgacaattttattaagtacatttgaattgtctcctgactactgtccagtaaggaggcccattgtcacttagaaaagacacctggaacccatgtgcatttctgcatctcctggattagcctttcacatgttgctggctcacattagtgccagttagtgccttcggtgtaagatcttctcatcagccctcaatttgtgatccggaattttatgagaaggattagaaatcagcacctgcgttttagagatcataattctcacctacttctgagcttatttttccatttgatattcattgatatcatgacttccaattgagaggaaaatgagatcaaatgtcatttcccaaatttcttgtaggccgttgtttcagattctttctgtcttggaatgtaaacatctgattctggaatgcagaaggagggggtctgggcatctgtggatttttggctactagaagtgtcccagaagtcactgtatttttgaaacttctaacgtcataattaagtttctcttgtcttggcatcaagaatagtcaagttttttggccgggcatggtggctcatgcctgtaatcccagcacttggggaggccaaggcaggcggatcacatgaggccaggaattcgagaccaacctggtcagcatggcaaaaccccgtctctactaaaagtacaaaaattagccaggcgtgatggcacgtgtctgtaatcccagctactctggagactgaggtgggagaatcgcttgagactgggaggcagaggttgcagtgaaccgagatcatgccaccgcacttcagcctgggtgacagagaaggactccgtctcaaaaaaaaaagaaaaaagaatagtcatttttaaactacctatctcatgcaatgaaagcattttcttccacaaagagcttaatcctcatgataggattgcctagtgtctcccatttgcaggtttctgggttgatgtcttaatgcataatactgcaagtgacatcagctggctgtgatgcttcgaaataggtctgctcctcacagctttgggaatctgaatggaagaagaaaagagagaagttaacaacctccactggggcaactttgtgaacacgtaggcacttagtcataggaaacatattatgtgcaggtcctagcctgggggaggaaagtagatagacagaaaatcattaggtaatttaagtactaaattgggcagggctttttagtatcaaatcactactagaccatttaatttgttaaattatctctaggatggtgatttataacctacccaaagttatcgatattcttactaaactctgaggcctgaagttctgtgatagaccttaaataagtgtcctaagtcagtggttcccaaatctggctggtcgggaatacctgggaagtttgttaaaattttttaaaaatgttttaagatttttgggtcctgagccagccgtggtggctcacacctgtaatcccagcactttgggaggctgaggcaggtggatcgcctgaggtcaggagttcaagatcaacctggccaacatactgaaaccccgtctctactaaaaataagaaaaattagctgggcgtggtggcgggcacctgtaatcccagctacttgggagactgaggcaggagaatcgcttgaacctgggagttagaggttgcagtgagctgagatcacaccattgcgcttcagcctgggcaacaagagtgaaactccatctccaaaaaaaaaaaacaaaaagaaaaagatttttgggtcccgacctcaaacctactgaatcagaatttctagggatgaagcctaggaatgtgttgttgttttcagagcttccctggtgattgtgataagcctggtttggaaaccattgctggagaactttgtaaagatacagagacccagaccttttgtatttacatttaaatacaaatacaaatcctgggtttctatatattctgttagcttttcaggtgattctgctacacagacgttgaaaaccactgccctaagaaagagatcagaggccacatatcagagagaaaagggaccaaaccttcggtggtttgttgtgtgtcgttttaatgccaattattttaacttgcacagtcttctgaaaccttgtattaatagttctcttttgtattaccattttcaggtagggttttgatcactatgattctgaagataatagtgaaatagtgaatttcattgatatgaagagataattgattttcattcattggtttgaacacctgcaaaatcacaaataaatgagaactaagtcttgtaaaaaaaaaaaaaaaaa

SEQ ID NO: 150 - DNA, 1131 bp, Homo sapiens
  human SH3 domain-binding glutamic acid-rich-like protein 3 (SH3BGRL3) cDNA
tggagagagcggctctcgtggctggggagttggatgcaccaaacctgtgtgcggctggagagggaggcttctgccagaccctctcccgggcctgtcctgccacccaggcccctccccagtctcacactgagctccagatcagggaagggccgaaaaggacgatcagggcagccgcagaaggggcgccctgcgtgggacgggtccgttgcgcgcctggtaaccgagggggaagggaaggggcctctggcgtgcggggcggtgtcgcgcaggtcccaccccgcctgcccgcgccgcccattggtcccgagcgcgatgacttggcgggcggagcaggaaggaaaccgctcccgagcacggcggcggcgtcgtctcccggcagtgcagctgccgctaccgccgccctctgcccgccggcccgtctgtctacccccagcatgagcggcctgcgcgtctacagcacgtcggtcaccggctcccgcgaaatcaagtcccagcagagcgaggtgacccgaatcctggatgggaagcgcatccaataccagctagtggacatctcccaggacaacgccctgagggatgagatgcgagccttggcaggcaaccccaaggccaccccaccccagattgtcaacggggaccagtactgtggggactatgagctcttcgtggaggctgtggaacaaaacacgctgcaggagttcctgaagctggcttgagtcaagcctgtccagagttcccctgctggactccatcaccacactccccccagccttcacctggccatgaaggaccttttgaccaactccctgtcattcctaacctaaccttagagtccctcccccaatgcaggccacttctcctccctcctctctaaatgtagtcccctctcctccatctaaaggcaacattccttacccattagtctcagaaattgtcttaagcaacagccccaaatgctggctgcccccagccaagcattggggccgccatcctgcctggcactggctgatgggcacctctgttggttccatcagccagagctctgccaaaggccccgcagtccctctcccaggaggaccctagaggcaattaaatgatgtcctgttccattggcaaaaaaaaaaaaaaaaa

SEQ ID NO: 151 - DNA, 2416 bp, Homo sapiens
  human tachykinin receptor 2 (TACR2), substance-K receptor cDNA
agagaacggcagggaagctgcagcgagggctggcagctggcagagccctgagcacccagcacccagcccggcttgcagcccaaagcctggagagaggctgctgcgccattgacctgtggactccagagactcccgctgtgcattcctctgatctggaaggtttcctgaattacgtgacgagaaacctgggttcgagtcctaacttgtcaccaacttcctgagtgacctgggctggtcccgtcccctcttggaatctctgtcttccatctcttcagcgaaggggttgatttataagggtgttttctgctctgacactgtgatttgaattctgtgtttccacatgatattcgagaagtctggccggaaggatggaatctgaaatgacaatggttctggactgggctttgtgctcagcccagctcatctttgcctgagacctaggagtggccccaggctctcctgatgtgccaccacgcttggcatctgctcctctccctgcccccatattcccatgctctgaaggggagttctctttcatagcaaatccgagaggagccgaggagccaggtcctttgttccagacccagaagcagccatggggacctgtgacattgtgactgaagccaatatctcatctggccctgagagcaacaccacgggcatcacagccttctccatgcccagctggcaactggcactgtgggccacagcctacctggccctggtgctggtggccgtgacgggtaatgccatcgtcatctggatcatcctggcccatcggaggatgcgcacagtcaccaactacttcatcgtcaatctggcgctggctgacctctgcatggctgccttcaatgccgccttcaactttgtctatgccagccacaacatctggtactttggccgtgccttctgctacttccagaacctcttccccatcacagccatgtttgtcagcatctactccatgaccgccattgctgccgacaggtacatggccatcgtccaccccttccagcctcggctttcagctcccagcaccaaggcggttattgctggcatctggctggtggctctcgccctggcctcccctcagtgcttctactccaccgtcaccatggaccagggtgccaccaagtgcgtggtggcctggcccgaagacagcgggggcaagacgctcctcctgtaccacctcgtggtgatcgccctcatctacttcctgccgctcgcggtgatgtttgtagcctacagcgtcatcggcctcacgctctggaggcgcgcagtgcccggacatcaggcgcacggtgccaacctgcgccacctgcaggccatgaagaagtttgtgaagaccatggtgctggtggtgctgacgtttgccatctgctggctgccctaccacctctacttcatcctgggcagcttccaggaggacatctactgccacaagttcatccagcaagtctacctggcactcttctggttggccatgagctctaccatgtacaatcccatcatctactgctgtctcaaccacaggtttcgctctggattccggcttgccttccgctgctgcccatgggtcacacccaccaaggaagataagctcgagctgactcccacgacctccctctccacgagagtcaacaggtgtcacactaaggagactttgttcatggctggggacacagccccctccgaggctaccagtggggaggcggggcgtccccaggatggatcagggctatggtttgggtatggtttgcttgcccccaccaaaactcatgttgaaatttgatcccaatgtggcagtgttgggaggtaggggttagtgggaggtgtttgggtattggggatggatcccttatgaatagattaatgccttccagttgaagtgaatcatcactcttgtgggaatggactagttcccaaaataacaagttgttagaaagagtgtggtgtcctcagtttccctgtcttgcttcctctctcaccatgtgatctctttgcacacaacacttcccttccactttccaccatgacaagaagcagcctgaggccttcaccagatgcagctgcccaatcttggatattccagccaccagaatcatgagccaaataaacctcttttctttataaattacctagtctcaggtattccatgaaagcaacacaaatggactgagataggtgcctattgaaccctgaagccttgtgcctggctgcagaatgaggtgtagcaccctttgagaagtagccaatcgagaagaccacatctgaaagttcagctcatgccccatccttcagtataccaatacaaagacaacatggggccagaactccagaaaggatgctgactttaagaggactcagccacccatctcagagagcacttcagaggatccagtaagggtcagaaaag

SEQ ID NO: 152 - DNA, 3374 bp, Homo sapiens
  human WEE1 homolog (S. pombe), transcript variant 1, wee1-like protein kinase isoform 1 (WEE1) cDNA
ctgagactggacctgaggagacctcagcctcggtgctcgggccgccccgcctctgccggaaagtccgcgccgccgctgccgccaccgtccgcagcccgagcgccccggagccgcaggccgccgccgcgcagagacgccgcggctgcgactaggcgcgcccagccgcacgtggcggacccgcccccaggcccgcagtgtcctggaccccgcaggcctccgctctcctgtcctcggccccgtccccagggccgcgatgagcttcctgagccgacagcagccgccgccaccccgccgcgccggggcggcctgcaccttgcggcagaagctgatcttctcgccctgcagcgactgtgaggaggaggaagaagaggaggaggaggagggcagcggccacagcaccggggaggactcggcctttcaagagcccgactcgccgctgccgcccgcgcggagccccacggagcccgggcccgagcgccgccgctcgcccgggccggcccccggcagccccggcgagctggaggaggacctgttgctgcccggcgcctgcccgggcgcggacgaggcgggcggtggggcggagggcgactcgtgggaggaggagggcttcggctcctcgtcgccggtcaagtcgccggcggccccctacttcctgggtagctctttctcgccggtgcgctgcggcggcccaggagatgcgtcgccgcggggttgcggggcgcgccgggcgggcgaaggccgccgctcgccgcggccggaccacccgggcaccccgccacacaagaccttccgcaagctgcgactcttcgacaccccgcacacgcccaagagtttgctctccaaagctcggggaattgattccagctctgttaaactccggggtagttctctcttcatggatacagaaaaatcaggaaaaagggaatttgatgtgcgacagactcctcaagtgaatattaatccttttactccggattctttgttgcttcattcctcaggacagtgtcgtcgtagaaagagaacgtattggaatgattcctgtggtgaagacatggaagccagtgattatgagcttgaagatgaaacaagacctgctaagagaattacaattactgaaagcaatatgaagtcccggtatacaacagaatttcatgagctagagaaaatcggctctggagaatttggttctgtatttaagtgtgtgaagaggctggatggatgcatttatgccattaagcgatcaaaaaagccattggcgggctctgttgatgagcagaacgctttgagagaagtatatgctcatgcagtgcttggacagcattctcatgtagttcgatatttctctgcgtgggcagaagatgatcatatgcttatacagaatgaatattgtaatggtggaagtttagctgatgctataagtgaaaactacagaatcatgagttactttaaagaagcagagttgaaggatctccttttgcaagttggccgaggcttgaggtatattcattcaatgtctttggttcacatggatataaaacctagtaatattttcatatctcgaacctcaatcccaaatgctgcctctgaagaaggagacgaagatgattgggcatccaacaaagttatgtttaaaataggtgatcttgggcatgtaacaaggatctccagtccacaagttgaagagggcgatagtcgttttcttgcaaatgaagttttacaggagaattatacccatctaccaaaagcagatatttttgcgcttgccctcacagtggtatgtgctgctggtgctgaacctcttccgagaaatggagatcaatggcatgaaatcagacagggtagattacctcggataccacaagtgctttcccaagaatttacagagttgctaaaagttatgattcatccagatccagagagaagaccttcagcaatggcactggtaaagcattcagtattgctgtccgcttctagaaagagtgcagaacaattacgaatagaattgaatgccgaaaagttcaaaaattcacttttacaaaaagaactcaagaaagcacagatggcaaaagctgcagctgaggaaagagcactcttcactgaccggatggccactaggtccaccacccagagtaatagaacatctcgacttattggaaagaaaatgaaccgctctgtcagccttactatatactgagctactcctttcccacctccccctgaacactgtgacaagaggaagctaggttgaaatcactgatagaatccagtttgcaattactttctcgattggtgtcagtagttttactgattaggacttttattgtgaattacagttgaaagctgtattttgatgattgctatgtcaggctttcatctaatcttaccagtctgtcttctgtaggatgtgtcactgttggatgttacaccagcctttccagggttaaccactgtggtggtgtgctgcttatagtttgctgttgcattgtaataaaaggtgtctttccctgtagtgacctgtaaaaagtactcaagggctttattacagacataccctccctttgaaaagggacatgctaaaagactcattactactcagccttcaatgtacctgtgtgtccatcttatatttcttttttttttaattgtgaattagacttgtatatcccactgggagcactttgtaggcattgcatgaaccatgggatgatgattctgtggaggtattgccttgtgaatttgctgctattttagttttgtctttgctgtaaacttgtagcattaaacaatcattgttgttaataggtcttctttttgaaacaattatgtgaaatgtatagctgcttttgatgaaaagcagctatttgcctttttttttttttcctttgaactttgaagctagtgcattggaaaaatgcaccctttccctcctttggaatgctgtattaatgtagtataataattactggttttgtaacttgttctggtaatgtccttcccggactctttttaaatgtctccccctaagttttatacttgattgtattattagtctgtttttaaatgttttgcccggtttttctcttcaatatttgtgtatataaaccgatcttcgtgatactgtacatagctgtttgaaatgccagaatgacttctgacattccaagtttttcacaaaatatattttatctgtgattagccatttgactaataatactggctaacagatgttgaaaaaaattgtctgtttgttttctcattaattttggtctaaaacatgtttgcacttgtctttgacttgtgttttattaacattgattggcatattaaaagtcactctgagcttaccttaattgtctaaaaaaaaaaaaaaaaaa

SEQ ID NO: 153 - DNA, 2729 bp, Homo sapiens
  human zinc finger protein 326 (ZNF326), transcript variant 1 cDNA
gtggcctgcggctcccgggctggtagcgcgccgctctcggtcgcgcggagtgatcgtgtggaatcgcgggtcgcggacgctcgccgccggccatagctcagcctagcgccgccaaggccgacggccctcagcctctgccatggacttcgaggacgattacacacactccgcctgcaggaatacttatcagggctttaatggaatggatcgtgattatggccctggatcttatggagggatggatcgtgactatggccatggatcctatgggggtcagagatccatggattcctacctaaaccagtcatatggcatggacaatcacagtggtggtggtgggggtagcaggtttggaccttatgagtcttacgactccaggtcttctctgggtgggcgagatctgtacagatctggctatggttttaatgaacccgaacaaagccgcttcggaggtagttatggtggtcgatttgagagctcctaccggaatagccttgactctttcggaggtagaaaccagggcgggtctagctgggaagcaccttactcccgttcaaaattgaggcctgggtttatggaggacagaggaagagagaattactcttcctacagcagtttttcttcaccccatatgaagcctgcacctgtaggctctcgggggagaggaacgcctgcttatcctgaaagtacgtttggaagcagaaactatgatgcttttggaggaccatcaacaggcagaggccgaggccgaggacatatgggtgattttggaagcattcatagacccggaattgttgttgactatcaaaacaaatccaccaatgtgacagttgctgctgcaagaggaataaagagaaaaatgatgcagccatttaataagcccagtggaacctttatcaagaaacccaaactagcaaaacctatggagaagataagcctcagcaaatcacccacaaaaactgatcctaaaaatgaagaggaagaaaagcggcgaattgaggctcggcgagagaaacaaaggcgcagaagagaaaaaaacagtgagaaatacggagatggatacagaatggcatttacatgttcattttgtaaatttcgaacatttgaagaaaaagatattgaactgcatctggaaagttcttcacatcaggaaacattagatcatatacagaaacaaactaaatttgataaagtagttatggagtttttgcatgagtgtatggtgaataaattcaagaaaacatctattcgtaagcaacagacaaataatcaaacagaagtagttaaaataattgaaaaagatgttatggaaggtgttactgtagatgatcacatgatgaaggtagagacagttcattgcagcgcttgcagtgtttatatccctgctttacatagttcagttcagcagcacttaaaatctcctgatcatatcaaagggaagcaggcttataaggaacaaataaaaagagagagtgtcttgactgctacaagcattttaaataatccaatagtgaaggcgcgatatgaacgttttgttaagggtgagaatccttttgaaattcaagaccattctcaggatcagcaaatagaaggagatgaggaggatgaagagaagattgatgaacctattgaagaagaggaggatgaagatgaggaagaagaagcagaggaagtgggggaagtagaggaagtggaagaagtagaggaagtgagagaaggaggaatagagggcgagggaaatatacagggagtaggggaaggaggggaagtaggggtagtgggagaagtagagggagtgggggaagtagaggaagtagaggaattagaggaagagacagcaaaggaagaacctgctgacttccctgttgagcaacctgaagaaaattaaatataaggtattagatttaaaaggagctttacatttcggttctaatgtaaaaaagggtaagaaatttaatagcttaaaatatgaattaacacccatgttgcatgcattccacatattaaaatttgttttatataatttctaaatgtttaacatttgtttaataaaatgaaggcaaaactattttagtttagtttttatagctaccagacttagatccgataaattgtttgtataatttttaagcttaatttttattactttattggtgttaaggataacaaatgtgtattgttagtatatctattctaatcattttatcttaaatgctgctcttgggagtgaatattcaagtgtgcatcaattttttgaatacttaccctggaagatataaactgggcaagtattttgtgctctgtgtatttttttactgcattagacattgaatagtaatttgcgttaagatacgcttaaaggctctttgtgaccatgtttccctttgtagcaataaaatgttttttacgaaaactttctccctggattagcagtttaaatgaaacagagttcatcaatgaaatgagtatttaaaataaaaatttgccttaatgtatcagttcagctcacaagtattttaagatgattgagaagacttgaattaaagaaaaaaaaattctcaatcatatttttaaaatataagactaaaattgtttttaaaacacatttcaaatagaagtgagtttgaactgaccttatttatactctttttaagtttgttccttttccctgtgcctgtgtcaaatcttcaagtcttgctgaaaatacatttgatacaaagttaaaaaaa

SEQ ID NO: 154 - protein, 604 aa, Homo sapiens
  human core-binding factor, runt domain, alpha subunit 2 translocated to, 2 (CBFA2T2), transcript variant 2, protein CBFA2T2 isoform MTGR1b
MAKESGISLKEIQVLARQWKVGPEKRVPAMPGSPVEVKIQSRSSPPTMPPLPPINPGGPRPVSFTPTALSNGINHSPPTLNGAPSPPQRFSNGPASSTSSALTNQQLPATCGARQLSKLKRFLTTLQQFGNDISPEIGEKVRTLVLALVNSTVTIEEFHCKLQEATNFPLRPFVIPFLKANLPLLQRELLHCARAAKQTPSQYLAQHEHLLLNTSIASPADSSELLMEVHGNGKRPSPERREENSFDRDTIAPEPPAKRVCTISPAPRHSPALTVPLMNPGGQFHPTPPPLQHYTLEDIATSHLYREPNKMLEHREVRDRHHSLGLNGGYQDELVDHRLTEREWADEWKHLDHALNCIMEMVEKTRRSMAVLRRCQESDREELNYWKRRYNENTELRKTGTELVSRQHSPGSADSLSNDSQREFNSRPGTGYVPVEFWKKTEEAVNKVKIQAMSEVQKAVAEAEQKAFEVIATERARMEQTIADVKRQAAEDAFLVINEQEESTENCWNCGRKASETCSGCNIARYCGSFCQHKDWERHHRLCGQNLHGQSPHGQGRPLLPVGRGSSARSADCSVPSPALDKTSATTSRSSTPASVTAIDTNGL

SEQ ID NO: 155 - protein, 300 aa, Homo sapiens
  human hydroxysteroid (17-beta) dehydrogenase 11 (HSD17B11), estradiol 17-beta-dehydrogenase 11
MKFLLDILLLLPLLIVCSLESFVKLFIPKRRKSVTGEIVLITGAGHGIGRLTAYEFAKLKSKLVLWDINKHGLEETAAKCKGLGAKVHTFVVDCSNREDIYSSAKKVKAEIGDVSILVNNAGVVYTSDLFATQDPQIEKTFEVNVLAHFWTTKAFLPAMTKNNHGHIVTVASAAGHVSVPFLLAYCSSKFAAVGFHKTLTDELAALQITGVKTTCLCPNFVNTGFIKNPSTSLGPTLEPEEVVNRLMHGILTEQKMIFIPSSIAFLTTLERILPERFLAVLKQKISVKFDAVIGYKMKAQ

SEQ ID NO: 156 - protein, 860 aa, Homo sapiens [sequence omitted]

SEQ ID NO: 157 - protein, 863 aa, Homo sapiens
  human microtubule associated monoxygenase, calponin and LIM domain containing 1 (MICAL)-like protein 1 (MICALL1)
MAGPRGALLAWCRRQCEGYRGVEIRDLSSSFRDGLAFCAILHRHRPDLLDFDSLSKDNVFENNRLAFEVAEKELGIPALLDPNDMVSMSVPDCLSIMTYVSQYYNHFCSPGQAGVSPPRKGLAPCSPPSVAPTPVEPEDVAQGEELSSGSLSEQGTGQTPSSTCAACQQHVHLVQRYLADGRLYHRHCFRCRRCSSTLLPGAYENGPEEGTFVCAEHCARLGPGTRSGTRPGPFSQPKQQHQQQLAEDAKDVPGGGPSSSAPAGAEADGPKASPEARPQIPTKPRVPGKLQELASPPAGRPTPAPRKASESTTPAPPTPRPRSSLQQENLVEQAGSSSLVNGRLHELPVPKPRGTPKPSEGTPAPRKDPPWITLVQAEPKKKPAPLPPSSSPGPPSQDSRQVENGGTEEVAQPSPTASLESKPYNPFEEEEEDKEEEAPAAPSLATSPALGHPESTPKSLHPWYGITPTSSPKTKKRPAPRAPSASPLALHASRLSHSEPPSATPSPALSVESLSSESASQTAGAELLEPPAVPKSSSEPAVHAPGTPGNPVSLSTNSSLASSGELVEPRVEQMPQASPGLAPRTRGSSGPQPAKPCSGATPTPLLLVGDRSPVPSPGSSSPQLQVKSSCKENPFNRKPSPAASPATKKATKGSKPVRPPAPGHGFPLIKRKVQADQYIPEEDIHGEMDTIERRLDALEHRGVLLEEKLRGGLNEGREDDMLVDWFKLIHEKHLLVRRESELIYVFKQQNLEQRQADVEYELRCLLNKPEKDWTEEDRAREKVLMQELVTLIEQRNAIINCLDEDRQREEEEDKMLEAMIKKKEFQREAEPEGKKKGKFKTMKMLKLLGNKRDAKSKSPRDKS

SEQ ID NO: 158 - protein, 203 aa, Homo sapiens
  human RAB7, member RAS oncogene family-like 1, transcript variant 2, ras-related protein Rab-7L1 (RAB7L1) isoform 1
MGSRDHLFKVLVVGDAAVGKTSLVQRYSQDSFSKHYKSTVGVDFALKVLQWSDYEIVRLQLWDIAGQERFTSMTRLYYRDASACVIMFDVTNATTFSNSQRWKQDLDSKLTLPNGEPVPCLLLANKCDLSPWAVSRDQIDRFSKENGFTGWTETSVKENKNINEAMRVLIEKMMRNSTEDIMSLSTQGDYINLQTKSSSWSCC

SEQ ID NO: 159 - protein, 93 aa, Homo sapiens
  human SH3 domain-binding glutamic acid-rich-like protein 3 (SH3BGRL3)
MSGLRVYSTSVTGSREIKSQQSEVTRILDGKRIQYQLVDISQDNALRDEMRALAGNPKATPPQIVNGDQYCGDYELFVEAVEQNTLQEFLKLA

SEQ ID NO: 160 - protein, 398 aa, Homo sapiens
  human tachykinin receptor 2 (TACR2), substance-K receptor
MGTCDIVTEANISSGPESNTTGITAFSMPSWQLALWATAYLALVLVAVTGNAIVIWIILAHRRMRTVTNYFIVNLALADLCMAAFNAAFNFVYASHNIWYFGRAFCYFQNLFPITAMFVSIYSMTAIAADRYMAIVHPFQPRLSAPSTKAVIAGIWLVALALASPQCFYSTVTMDQGATKCVVAWPEDSGGKTLLLYHLVVIALIYFLPLAVMFVAYSVIGLTLWRRAVPGHQAHGANLRHLQAMKKFVKTMVLVVLTFAICWLPYHLYFILGSFQEDIYCHKFIQQVYLALFWLAMSSTMYNPIIYCCLNHRFRSGFRLAFRCCPWVTPTKEDKLELTPTTSLSTRVNRCHTKETLFMAGDTAPSEATSGEAGRPQDGSGLWFGYGLLAPTKTHVEI

SEQ ID NO: 161 - protein, 646 aa, Homo sapiens
  human WEE1 homolog (S. pombe), transcript variant 1, wee1-like protein kinase isoform 1 (WEE1)
MSFLSRQQPPPPRRAGAACTLRQKLIFSPCSDCEEEEEEEEEEGSGHSTGEDSAFQEPDSPLPPARSPTEPGPERRRSPGPAPGSPGELEEDLLLPGACPGADEAGGGAEGDSWEEEGFGSSSPVKSPAAPYFLGSSFSPVRCGGPGDASPRGCGARRAGEGRRSPRPDHPGTPPHKTFRKLRLFDTPHTPKSLLSKARGIDSSSVKLRGSSLFMDTEKSGKREFDVRQTPQVNINPFTPDSLLLHSSGQCRRRKRTYWNDSCGEDMEASDYELEDETRPAKRITITESNMKSRYTTEFHELEKIGSGEFGSVFKCVKRLDGCIYAIKRSKKPLAGSVDEQNALREVYAHAVLGQHSHVVRYFSAWAEDDHMLIQNEYCNGGSLADAISENYRIMSYFKEAELKDLLLQVGRGLRYIHSMSLVHMDIKPSNIFISRTSIPNAASEEGDEDDWASNKVMFKIGDLGHVTRISSPQVEEGDSRFLANEVLQENYTHLPKADIFALALTVVCAAGAEPLPRNGDQWHEIRQGRLPRIPQVLSQEFTELLKVMIHPDPERRPSAMALVKHSVLLSASRKSAEQLRIELNAEKFKNSLLQKELKKAQMAKAAAEERALFTDRMATRSTTQSNRTSRLIGKKMNRSVSLTIY

SEQ ID NO: 162 - protein, 582 aa, Homo sapiens
  human zinc finger protein 326 (ZNF326), isoform 1
MDFEDDYTHSACRNTYQGFNGMDRDYGPGSYGGMDRDYGHGSYGGQRSMDSYLNQSYGMDNHSGGGGGSRFGPYESYDSRSSLGGRDLYRSGYGFNEPEQSRFGGSYGGRFESSYRNSLDSFGGRNQGGSSWEAPYSRSKLRPGFMEDRGRENYSSYSSFSSPHMKPAPVGSRGRGTPAYPESTFGSRNYDAFGGPSTGRGRGRGHMGDFGSIHRPGIVVDYQNKSTNVTVAAARGIKRKMMQPFNKPSGTFIKKPKLAKPMEKISLSKSPTKTDPKNEEEEKRRIEARREKQRRRREKNSEKYGDGYRMAFTCSFCKFRTFEEKDIELHLESSSHQETLDHIQKQTKFDKVVMEFLHECMVNKFKKTSIRKQQTNNQTEVVKIIEKDVMEGVTVDDHMMKVETVHCSACSVYIPALHSSVQQHLKSPDHIKGKQAYKEQIKRESVLTATSILNNPIVKARYERFVKGENPFEIQDHSQDQQIEGDEEDEEKIDEPIEEEEDEDEEEEAEEVGEVEEVEEVEEVREGGIEGEGNIQGVGEGGEVGVVGEVEGVGEVEEVEELEEETAKEEPADFPVEQPEEN

1. A method for diagnosing Irritable Bowel Syndrome (IBS) in a subject in need thereof, the method comprising:
(a) isolating and/or amplifying RNA from a biological sample taken from the subject;
(b) contacting the isolated and/or amplified RNA with a detection reagent under conditions suitable to transform the detection reagent into a complex comprising the detection reagent and an IBS RNA biomarker;
(c) detecting the level of the complex; and
(d) determining if the level of the complex more closely resembles a first reference level associated with IBS or a second reference level associated with an absence of IBS, thereby diagnosing IBS in the subject,
wherein the biomarker is an RNA from a gene selected from the group consisting of those found in Table 4 such as CCDC147.

2. The method of claim 1, wherein said method comprises detecting the level of at least two IBS biomarkers selected from the group consisting of those found in Table 4 such as CCDC147 and VIPR1.

3. The method of claim 2, wherein said method comprises detecting the level of at least five IBS biomarkers selected from the group consisting of those found in Table 4.

4. The method of claim 3, wherein the biomarkers are CCDC147, VIPR1, LPAR5, CCDC144A, and GNG3.

5. The method of claim 1, wherein the biomarkers are selected from those found in Table 1.

6. The method of claim 1, wherein the biomarker is selected from the group consisting of CCDC147, VIPR1, LPAR5, CCDC144A, GNG3, ACSS2, ZNF33B, PMS2L2, RUSC1, ARHGE, ASIP, OR2L8, PI4K2A, and FOXD3.

7-11. (canceled)

12. The method of claim 1, wherein the biomarker is a mRNA molecule encoding a protein having an amino acid sequence of any one of SEQ ID NOS:1 to 75 and 154 to 162.

13. The method of claim 1, wherein the biomarker is an RNA molecule comprising a nucleic acid sequence of any one of SEQ ID NOS:76 to 162.

14. The method of claim 1, wherein said detection reagent comprises an oligonucleotide.

15. The method of claim 14, wherein the step of detecting the level of the complex comprises oligonucleotide hybridization.

16. The method of claim 15, wherein the method comprises microarray or bead-based hybridization.

17. The method of claim 14, wherein the step of detecting the level of the complex comprises nucleic acid amplification.

18. The method of claim 17, wherein the method comprises qPCR or mass spectrometry.

19. The method of claim 2, wherein the step of detecting the level of the complexes comprises quantitating the levels of a plurality of biomarkers, thereby determining a biomarker profile.

20. The method of claim 19, wherein the step of determining if the level of the complex more closely resembles a first or second reference level comprises the use of an algorithm to determine if the biomarker profile more closely resembles a first reference profile associated with IBS or a second reference profile associated with the absence of IBS.

21. (canceled)

22. (canceled)

23. (canceled)

24. (canceled)

25. The method of claim 1, wherein the biological sample is selected from the group consisting of serum, plasma, whole blood, and stool.

26. The method of claim 1, wherein the method further comprises the detection of a biomarker selected from the group consisting of a cytokine, a growth factor, an anti-neutrophil antibody, an anti-Saccharomyces cerevisiae antibody (ASCA), an antimicrobial antibody, mast cell marker, stress marker, gastrointestinal hormone, serotonin metabolite, serotonin pathway marker, carbohydrate deficient transferrin (CDT), lactoferrin, an anti-tissue transglutaminase (tTG) antibody, a lipocalin, a matrix metalloproteinase (MMP), a complex of lipocalin and MMP, a tissue inhibitor of metalloproteinases (TIMPs), a globulin (e.g., an alpha-globulin), an actin-severing protein, an S100 protein, a fibrinopeptide, calcitonin gene-related peptide (CGRP), a tachykinin, ghrelin, neurotensin, corticotropin-releasing hormone (CRH), elastase, C-reactive protein (CRP), lactoferrin, an anti-lactoferrin antibody, calprotectin, hemoglobin, NOD2/CARD15, serotonin reuptake transporter (SERT), tryptophan hydroxylase-1, 5-hydroxytryptamine (5-HT), lactulose, serine protease, prostaglandin, histamine, and a combination thereof.

27-38. (canceled)

39. The method of claim 1, wherein the method further comprises determining a symptom profile, wherein said symptom profile is determined by identifying the presence or severity of at least one symptom in said individual; and classifying said sample as an IBS sample or non-IBS sample using an algorithm based upon said diagnostic marker profile and said symptom profile.

40-47. (canceled)

48. A method for monitoring the progression or regression of Irritable Bowel Syndrome (IBS) in a subject, said method comprising:
(a) determining a first biomarker profile from a first biological sample taken from the subject at a first point in time;
(b) determining a second biomarker profile from a second biological sample taken from the subject at a second point in time; and
(c) comparing said first and said second biomarker profiles to (i) determine which biomarker profile most resembles or least resembles a first reference profile associated with IBS, (ii) determine which biomarker profile least resembles or most resembles a second reference profile associated with the absence of IBS, or (iii) determining at least 2 of the foregoing resemblances,
wherein said biomarker profiles comprise information about the expression of at least 2 biomarkers found in Table 4,
thereby monitoring progression or regression of IBS in said subject.

49. (canceled)

50. (canceled)

51. (canceled)

52. (canceled)

53. A method for assigning therapy for IBS to a subject in need thereof, the method comprising:
(a) isolating and/or amplifying RNA from a biological sample taken from the subject;
(b) contacting the isolated and/or amplified RNA with a detection reagent under conditions suitable to transform the detection reagent into a complex comprising the detection reagent and an IBS RNA biomarker;
(c) detecting the level of the complex;
(d) determining if the level of the complex more closely resembles a first reference level associated with IBS or a second reference level associated with an absence of IBS; and
(e) assigning therapy for IBS if said level more closely resembles said first reference level associated with IBS, wherein the IBS RNA biomarker is selected from the group consisting of those found in Table 4.

54-62. (canceled)
